United States Patent Application Publication US 2026/0347815 A1, published November 5, 2026 (application 19/113,051).

The application's sequence listing, which the Patent Office published only in electronic form, follows.

SEQUENCE LISTING (11130 sequences)

SEQ ID NO: 1 - RNA, 20 nt, synthetic construct
  source 1..20: mol_type = other RNA
aaaaacatcacaaggagaca

SEQ ID NO: 2 - RNA, 20 nt, synthetic construct
  source 1..20: mol_type = other RNA
aaaacatcacaaggagacac

SEQ ID NO: 3 - RNA, 20 nt, synthetic construct
  source 1..20: mol_type = other RNA
aaaaccgtttgctggggctg

SEQ ID NO: 4 - RNA, 20 nt, synthetic construct
  source 1..20: mol_type = other RNA
aaacatcacaaggagacaca

SEQ ID NO: 5 - RNA, 20 nt, synthetic construct
  source 1..20: mol_type = other RNA
aaacatccccaggcccaatc

SEQ ID NO: 6 - RNA, 20 nt, synthetic construct
  source 1..20: mol_type = other RNA
aaaccgtttgctggggctgg

SEQ ID NO: 7 - RNA, 20 nt, synthetic construct
  source 1..20: mol_type = other RNA
aaacggttttacttcttctc

SEQ ID NO: 8 - RNA, 20 nt, synthetic construct
  source 1..20: mol_type = other RNA
aaactctataagagagatcc

SEQ ID NO: 9 - RNA, 20 nt, synthetic construct
  source 1..20: mol_type = other RNA
aaaggaggccaccaccacca

SEQ ID NO: 10 - RNA, 20 nt, synthetic construct
  source 1..20: mol_type = other RNA
aacagggtcccgtccttgac

SEQ ID NO: 11 - RNA, 20 nt, synthetic construct
  source 1..20: mol_type = other RNA
aacatcacaaggagacacag

SEQ ID NO: 12 - RNA, 20 nt, synthetic construct
  source 1..20: mol_type = other RNA
aacatccccaggcccaatcc

SEQ ID NO: 13 - RNA, 20 nt, synthetic construct
  source 1..20: mol_type = other RNA
aaccacagcacaggcctgtg

SEQ ID NO: 14 - RNA, 20 nt, synthetic construct
  source 1..20: mol_type = other RNA
aaccagaaccatgaaaaaca

SEQ ID NO: 15 - RNA, 20 nt, synthetic construct
  source 1..20: mol_type = other RNA
aaccatgaaaaacatcacaa

SEQ ID NO: 16 - RNA, 20 nt, synthetic construct
  source 1..20: mol_type = other RNA
aaccgtttgctggggctggc

SEQ ID NO: 17 - RNA, 20 nt, synthetic construct
  source 1..20: mol_type = other RNA
aacctctgtgcccagaaggc

SEQ ID NO: 18 - RNA, 20 nt, synthetic construct
  source 1..20: mol_type = other RNA
aacggttttacttcttctca

SEQ ID NO: 19 - RNA, 20 nt, synthetic construct
  source 1..20: mol_type = other RNA
aactccgagaggtaagcctg

SEQ ID NO: 20 - RNA, 20 nt, synthetic construct
  source 1..20: mol_type = other RNA
aactctataagagagatcca

SEQ ID NO: 21 - RNA, 20 nt, synthetic construct
  source 1..20: mol_type = other RNA
aactgtgcctggaggggccc

SEQ ID NO: 22 - RNA, 20 nt, synthetic construct
  source 1..20: mol_type = other RNA
aagaactgtgcctggagggg

SEQ ID NO: 23 - RNA, 20 nt, synthetic construct
  source 1..20: mol_type = other RNA
aagaagagagggaaccacag

SEQ ID NO: 24 - RNA, 20 nt, synthetic construct
  source 1..20: mol_type = other RNA
aagaagtaaaaccgtttgct

SEQ ID NO: 25 - RNA, 20 nt, synthetic construct
  source 1..20: mol_type = other RNA
aagagagatccagcttgcct

SEQ ID NO: 26 - RNA, 20 nt, synthetic construct
  source 1..20: mol_type = other RNA
aagagagggaaccacagcac

SEQ ID NO: 27 - RNA, 20 nt, synthetic construct
  source 1..20: mol_type = other RNA
aagagctgaaacatccccag

SEQ ID NO: 28 - RNA, 20 nt, synthetic construct
  source 1..20: mol_type = other RNA
aagaggaggcaagctggatc

SEQ ID NO: 29 - RNA, 20 nt, synthetic construct
  source 1..20: mol_type = other RNA
aagcctgccggcagactgct

SEQ ID NO: 30 - RNA, 20 nt, synthetic construct
  source 1..20: mol_type = other RNA
aagctggatctctcttatag

SEQ ID NO: 31 - RNA, 20 nt, synthetic construct
  source 1..20: mol_type = other RNA
aaggacgggaccctgttgct

SEQ ID NO: 32 - RNA, 20 nt, synthetic construct
  source 1..20: mol_type = other RNA
aaggagacacaggcctgtgc

SEQ ID NO: 33 - RNA, 20 nt, synthetic construct
  source 1..20: mol_type = other RNA
aaggagctggcagaactccg

SEQ ID NO: 34 - RNA, 20 nt, synthetic construct
  source 1..20: mol_type = other RNA
aaggaggccaccaccaccac

SEQ ID NO: 35 - RNA, 20 nt, synthetic construct
  source 1..20: mol_type = other RNA
aaggcaaccagaaccatgaa

SEQ ID NO: 36 - RNA, 20 nt, synthetic construct
  source 1..20: mol_type = other RNA
aaggcctggtcaaaggaggc

SEQ ID NO: 37 - RNA, 20 nt, synthetic construct
  source 1..20: mol_type = other RNA
aagggctgctgcatggcagc

SEQ ID NO: 38 - RNA, 20 nt, synthetic construct
  source 1..20: mol_type = other RNA
aagtaaaaccgtttgctggg

SEQ ID NO: 39 - RNA, 20 nt, synthetic construct
  source 1..20: mol_type = other RNA
aatcctaccaaggcaaccag

SEQ ID NO: 40 - RNA, 20 nt, synthetic construct
  source 1..20: mol_type = other RNA
aattacccatatccccagat

SEQ ID NO: 41 - RNA, 20 nt, synthetic construct
  source 1..20: mol_type = other RNA
aattgaagggctgctgcatg

SEQ ID NO: 42 - RNA, 20 nt, synthetic construct
  source 1..20: mol_type = other RNA
acaaggagacacaggcctgt

SEQ ID NO: 43 - RNA, 20 nt, synthetic construct
  source 1..20: mol_type = other RNA
acacaggcctgtgctgtggt

SEQ ID NO: 44 - RNA, 20 nt, synthetic construct
  source 1..20: mol_type = other RNA
acacctcagcctctacagga

SEQ ID NO: 45 - RNA, 20 nt, synthetic construct
  source 1..20: mol_type = other RNA
acagaaggagctggcagaac

SEQ ID NO: 46 - RNA, 20 nt, synthetic construct
  source 1..20: mol_type = other RNA
acagaggttggacagggaag

SEQ ID NO: 47 - RNA, 20 nt, synthetic construct
  source 1..20: mol_type = other RNA
acagcacaggcctgtgtctc

SEQ ID NO: 48 - RNA, 20 nt, synthetic construct
  source 1..20: mol_type = other RNA
acagcagtctgccggcaggc

SEQ ID NO: 49 - RNA, 20 nt, synthetic construct
  source 1..20: mol_type = other RNA
acagcagtgccagctctccc

SEQ ID NO: 50 - RNA, 20 nt, synthetic construct
  source 1..20: mol_type = other RNA
acaggactgagaagaagtaa

SEQ ID NO: 51 - RNA, 20 nt, synthetic construct
  source 1..20: mol_type = other RNA
acaggcctgtgctgtggttc

SEQ ID NO: 52 - RNA, 20 nt, synthetic construct
  source 1..20: mol_type = other RNA
acaggcctgtgtctccttgt

SEQ ID NO: 53 - RNA, 20 nt, synthetic construct
  source 1..20: mol_type = other RNA
acagggaagaactgtgcctg

SEQ ID NO: 54 - RNA, 20 nt, synthetic construct
  source 1..20: mol_type = other RNA
acagggtcccgtccttgaca

SEQ ID NO: 55 - RNA, 20 nt, synthetic construct
  source 1..20: mol_type = other RNA
acagttcttccctgtccaac

SEQ ID NO: 56 - RNA, 20 nt, synthetic construct
  source 1..20: mol_type = other RNA
acatcacaaggagacacagg

SEQ ID NO: 57 - RNA, 20 nt, synthetic construct
  source 1..20: mol_type = other RNA
acatccccaggcccaatcct

SEQ ID NO: 58 - RNA, 20 nt, synthetic construct
  source 1..20: mol_type = other RNA
accaaggcaaccagaaccat

SEQ ID NO: 59 - RNA, 20 nt, synthetic construct
  source 1..20: mol_type = other RNA
accacagcacaggcctgtgt

SEQ ID NO: 60 - RNA, 20 nt, synthetic construct
  source 1..20: mol_type = other RNA
accaccaccaccgccaccgc

SEQ ID NO: 61 - RNA, 20 nt, synthetic construct
  source 1..20: mol_type = other RNA
accaccaccgccaccgccac

SEQ ID NO: 62 - RNA, 20 nt, synthetic construct
  source 1..20: mol_type = other RNA
accaccgccaccgccaccac

SEQ ID NO: 63 - RNA, 20 nt, synthetic construct
  source 1..20: mol_type = other RNA
accactaccacctccgccgc

SEQ ID NO: 64 - RNA, 20 nt, synthetic construct
  source 1..20: mol_type = other RNA
accactgcctccactaccgc

SEQ ID NO: 65 - RNA, 20 nt, synthetic construct
  source 1..20: mol_type = other RNA
accagaaccatgaaaaacat

SEQ ID NO: 66 - RNA, 20 nt, synthetic construct
  source 1..20: mol_type = other RNA
accagctgccatgcagcagc

SEQ ID NO: 67 - RNA, 20 nt, synthetic construct
  source 1..20: mol_type = other RNA
accaggccttctgggcacag

SEQ ID NO: 68 - RNA, 20 nt, synthetic construct
  source 1..20: mol_type = other RNA
accatgaaaaacatcacaag

SEQ ID NO: 69 - RNA, 20 nt, synthetic construct
  source 1..20: mol_type = other RNA
acccagtagatctggggata

SEQ ID NO: 70 - RNA, 20 nt, synthetic construct
  source 1..20: mol_type = other RNA
acccatatccccagatctac

SEQ ID NO: 71 - RNA, 20 nt, synthetic construct
  source 1..20: mol_type = other RNA
acccctgaagaagagaggga

SEQ ID NO: 72 - RNA, 20 nt, synthetic construct
  source 1..20: mol_type = other RNA
accctgttgctgactgctca

SEQ ID NO: 73 - RNA, 20 nt, synthetic construct
  source 1..20: mol_type = other RNA
accgccaccactaccacctc

SEQ ID NO: 74 - RNA, 20 nt, synthetic construct
  source 1..20: mol_type = other RNA
accgccaccgccaccactac

SEQ ID NO: 75 - RNA, 20 nt, synthetic construct
  source 1..20: mol_type = other RNA
accgctgccacccctgaaga

SEQ ID NO: 76 - RNA, 20 nt, synthetic construct
  source 1..20: mol_type = other RNA
accgtttgctggggctggcc

SEQ ID NO: 77 - RNA, 20 nt, synthetic construct
  source 1..20: mol_type = other RNA
acctacagaaggagctggca

SEQ ID NO: 78 - RNA, 20 nt, synthetic construct
  source 1..20: mol_type = other RNA
acctcagcctctacaggact

SEQ ID NO: 79 - RNA, 20 nt, synthetic construct
  source 1..20: mol_type = other RNA
acctctcggagttctgccag

SEQ ID NO: 80 - RNA, 20 nt, synthetic construct
  source 1..20: mol_type = other RNA
acctctgtgcccagaaggcc

SEQ ID NO: 81 - RNA, 20 nt, synthetic construct
  source 1..20: mol_type = other RNA
acgggaccctgttgctgact

SEQ ID NO: 82 - RNA, 20 nt, synthetic construct
  source 1..20: mol_type = other RNA
acggttttacttcttctcag

SEQ ID NO: 83 - RNA, 20 nt, synthetic construct
  source 1..20: mol_type = other RNA
actaccacctccgccgccgc

SEQ ID NO: 84 - RNA, 20 nt, synthetic construct
  source 1..20: mol_type = other RNA
actaccgctgccacccctga

SEQ ID NO: 85 - RNA, 20 nt, synthetic construct
  source 1..20: mol_type = other RNA
actcaccagctgccatgcag

SEQ ID NO: 86 - RNA, 20 nt, synthetic construct
  source 1..20: mol_type = other RNA
actccgagaggtaagcctgc

SEQ ID NO: 87 - RNA, 20 nt, synthetic construct
  source 1..20: mol_type = other RNA
actctataagagagatccag

SEQ ID NO: 88 - RNA, 20 nt, synthetic construct
  source 1..20: mol_type = other RNA
actgagaagaagtaaaaccg

SEQ ID NO: 89 - RNA, 20 nt, synthetic construct
  source 1..20: mol_type = other RNA
actgcctccactaccgctgc

SEQ ID NO: 90 - RNA, 20 nt, synthetic construct
  source 1..20: mol_type = other RNA
actgctcaagaggaggcaag

SEQ ID NO: 91 - RNA, 20 nt, synthetic construct
  source 1..20: mol_type = other RNA
actgctgtccacccagtaga

SEQ ID NO: 92 - RNA, 20 nt, synthetic construct
  source 1..20: mol_type = other RNA
actgctgtgccctggaggca

SEQ ID NO: 93 - RNA, 20 nt, synthetic construct
  source 1..20: mol_type = other RNA
actgggtggacagcagtgcc

SEQ ID NO: 94 - RNA, 20 nt, synthetic construct
  source 1..20: mol_type = other RNA
actgtgcctggaggggccca

SEQ ID NO: 95 - RNA, 20 nt, synthetic construct
  source 1..20: mol_type = other RNA
acttcttctcagtcctgtag

SEQ ID NO: 96 - RNA, 20 nt, synthetic construct
  source 1..20: mol_type = other RNA
agaaccatgaaaaacatcac

SEQ ID NO: 97 - RNA, 20 nt, synthetic construct
  source 1..20: mol_type = other RNA
agaactccgagaggtaagcc

SEQ ID NO: 98 - RNA, 20 nt, synthetic construct
  source 1..20: mol_type = other RNA
agaactgtgcctggaggggc

SEQ ID NO: 99 - RNA, 20 nt, synthetic construct
  source 1..20: mol_type = other RNA
agaagaagtaaaaccgtttg

SEQ ID NO: 100 - RNA, 20 nt, synthetic construct
  source 1..20: mol_type = other RNA
agaagagagggaaccacagc

SEQ ID NO: 101 - RNA, 20 nt, synthetic construct
  source 1..20: mol_type = other RNA
agaaggagctggcagaactc

SEQ ID NO: 102 - RNA, 20 nt, synthetic construct
  source 1..20: mol_type = other RNA
agaaggcctggtcaaaggag

SEQ ID NO: 103 - RNA, 20 nt, synthetic construct
  source 1..20: mol_type = other RNA
agaagtaaaaccgtttgctg

SEQ ID NO: 104 - RNA, 20 nt, synthetic construct
  source 1..20: mol_type = other RNA
agacacaggcctgtgctgtg

SEQ ID NO: 105 - RNA, 20 nt, synthetic construct
  source 1..20: mol_type = other RNA
agactgctgtgccctggagg

SEQ ID NO: 106 - RNA, 20 nt, synthetic construct
  source 1..20: mol_type = other RNA
agagagatccagcttgcctc

SEQ ID NO: 107 - RNA, 20 nt, synthetic construct
  source 1..20: mol_type = other RNA
agagagggaaccacagcaca

SEQ ID NO: 108 - RNA, 20 nt, synthetic construct
  source 1..20: mol_type = other RNA
agagatccagcttgcctcct

SEQ ID NO: 109 - RNA, 20 nt, synthetic construct
  source 1..20: mol_type = other RNA
agagctgaaacatccccagg

SEQ ID NO: 110 - RNA, 20 nt, synthetic construct
  source 1..20: mol_type = other RNA
agagctggcactgctgtcca

SEQ ID NO: 111 - RNA, 20 nt, synthetic construct
  source 1..20: mol_type = other RNA
agaggaggcaagctggatct

SEQ ID NO: 112 - RNA, 20 nt, synthetic construct
  source 1..20: mol_type = other RNA
agaggctgaggtgtcaagga

SEQ ID NO: 113 - RNA, 20 nt, synthetic construct
  source 1..20: mol_type = other RNA
agagggaaccacagcacagg

SEQ ID NO: 114 - RNA, 20 nt, synthetic construct
  source 1..20: mol_type = other RNA
agaggtaagcctgccggcag

SEQ ID NO: 115 - RNA, 20 nt, synthetic construct
  source 1..20: mol_type = other RNA
agaggttggacagggaagaa

SEQ ID NO: 116 - RNA, 20 nt, synthetic construct
  source 1..20: mol_type = other RNA
agatccagcttgcctcctct

SEQ ID NO: 117 - RNA, 20 nt, synthetic construct
  source 1..20: mol_type = other RNA
agatctactgggtggacagc

SEQ ID NO: 118 - RNA, 20 nt, synthetic construct
  source 1..20: mol_type = other RNA
agatctggggatatgggtaa

SEQ ID NO: 119 - RNA, 20 nt, synthetic construct
  source 1..20: mol_type = other RNA
agcaaacggttttacttctt

SEQ ID NO: 120 - RNA, 20 nt, synthetic construct
  source 1..20: mol_type = other RNA
agcaacagggtcccgtcctt

SEQ ID NO: 121 - RNA, 20 nt, synthetic construct
  source 1..20: mol_type = other RNA
agcacaggcctgtgtctcct

SEQ ID NO: 122 - RNA, 20 nt, synthetic construct
  source 1..20: mol_type = other RNA
agcagcccttcaattaccca

SEQ ID NO: 123 - RNA, 20 nt, synthetic construct
  source 1..20: mol_type = other RNA
agcagtcagcaacagggtcc

SEQ ID NO: 124 - RNA, 20 nt, synthetic construct
  source 1..20: mol_type = other RNA
agcagtctgccggcaggctt

SEQ ID NO: 125 - RNA, 20 nt, synthetic construct
  source 1..20: mol_type = other RNA
agcagtgccagctctccctg

SEQ ID NO: 126 - RNA, 20 nt, synthetic construct
  source 1..20: mol_type = other RNA
agccccagcaaacggtttta

SEQ ID NO: 127 - RNA, 20 nt, synthetic construct
  source 1..20: mol_type = other RNA
agcccttcaattacccatat

SEQ ID NO: 128 - RNA, 20 nt, synthetic construct
  source 1..20: mol_type = other RNA
agcctctacaggactgagaa

SEQ ID NO: 129 - RNA, 20 nt, synthetic construct
  source 1..20: mol_type = other RNA
agcctgccggcagactgctg

SEQ ID NO: 130 - RNA, 20 nt, synthetic construct
  source 1..20: mol_type = other RNA
agcggtagtggaggcagtgg

SEQ ID NO: 131 - RNA, 20 nt, synthetic construct
  source 1..20: mol_type = other RNA
agctatggaaactctataag

SEQ ID NO: 132 - RNA, 20 nt, synthetic construct
  source 1..20: mol_type = other RNA
agctccttctgtaggtggaa

SEQ ID NO: 133 - RNA, 20 nt, synthetic construct
  source 1..20: mol_type = other RNA
agctctccctgggcccctcc

SEQ ID NO: 134 - RNA, 20 nt, synthetic construct
  source 1..20: mol_type = other RNA
agctcttccacctacagaag

SEQ ID NO: 135 - RNA, 20 nt, synthetic construct
  source 1..20: mol_type = other RNA
agctgaaacatccccaggcc

SEQ ID NO: 136 - RNA, 20 nt, synthetic construct
  source 1..20: mol_type = other RNA
agctgccatgcagcagccct

SEQ ID NO: 137 - RNA, 20 nt, synthetic construct
  source 1..20: mol_type = other RNA
agctggatctctcttataga

SEQ ID NO: 138 - RNA, 20 nt, synthetic construct
  source 1..20: mol_type = other RNA
agctggcactgctgtccacc

SEQ ID NO: 139 - RNA, 20 nt, synthetic construct
  source 1..20: mol_type = other RNA
agctggcagaactccgagag

SEQ ID NO: 140 - RNA, 20 nt, synthetic construct
  source 1..20: mol_type = other RNA
agctggtgagtcaggccagc

SEQ ID NO: 141 - RNA, 20 nt, synthetic construct
  source 1..20: mol_type = other RNA
agcttgcctcctcttgagca

SEQ ID NO: 142 - RNA, 20 nt, synthetic construct
  source 1..20: mol_type = other RNA
aggacgggaccctgttgctg

SEQ ID NO: 143 - RNA, 20 nt, synthetic construct
  source 1..20: mol_type = other RNA
aggactgagaagaagtaaaa

SEQ ID NO: 144 - RNA, 20 nt, synthetic construct
  source 1..20: mol_type = other RNA
aggagacacaggcctgtgct

SEQ ID NO: 145 - RNA, 20 nt, synthetic construct
  source 1..20: mol_type = other RNA
aggagctggcagaactccga

SEQ ID NO: 146 - RNA, 20 nt, synthetic construct
  source 1..20: mol_type = other RNA
aggaggcaagctggatctct

SEQ ID NO: 147 - RNA, 20 nt, synthetic construct
  source 1..20: mol_type = other RNA
aggaggccaccaccaccacc

SEQ ID NO: 148 - RNA, 20 nt, synthetic construct
  source 1..20: mol_type = other RNA
aggattgggcctggggatgt

SEQ ID NO: 149 - RNA, 20 nt, synthetic construct
  source 1..20: mol_type = other RNA
aggcaaccagaaccatgaaa

SEQ ID NO: 150 - RNA, 20 nt, synthetic construct
  source 1..20: mol_type = other RNA
aggcaagctggatctctctt

SEQ ID NO: 151 - RNA, 20 nt, synthetic construct
  source 1..20: mol_type = other RNA
aggcacagttcttccctgtc

SEQ ID NO: 152 - RNA, 20 nt, synthetic construct
  source 1..20: mol_type = other RNA
aggcagtggtggcggcggcg

SEQ ID NO: 153 - RNA, 20 nt, synthetic construct
  source 1..20: mol_type = other RNA
aggccaccaccaccaccgcc

SEQ ID NO: 154 - RNA, 20 nt, synthetic construct
  source 1..20: mol_type = other RNA
aggccagccccagcaaacgg

SEQ ID NO: 155 - RNA, 20 nt, synthetic construct
  source 1..20: mol_type = other RNA
aggcccaatcctaccaaggc

SEQ ID NO: 156 - RNA, 20 nt, synthetic construct
  source 1..20: mol_type = other RNA
aggcctggtcaaaggaggcc

SEQ ID NO: 157 - RNA, 20 nt, synthetic construct
  source 1..20: mol_type = other RNA
aggcctgtgctgtggttccc

SEQ ID NO: 158 - RNA, 20 nt, synthetic construct
  source 1..20: mol_type = other RNA
aggcctgtgtctccttgtga

SEQ ID NO: 159 - RNA, 20 nt, synthetic construct
  source 1..20: mol_type = other RNA
aggccttctgggcacagagg

SEQ ID NO: 160 - RNA, 20 nt, synthetic construct
  source 1..20: mol_type = other RNA
aggctgaggtgtcaaggacg

SEQ ID NO: 161 - RNA, 20 nt, synthetic construct
  source 1..20: mol_type = other RNA
aggcttacctctcggagttc

SEQ ID NO: 162 - RNA, 20 nt, synthetic construct
  source 1..20: mol_type = other RNA
agggaaccacagcacaggcc

SEQ ID NO: 163 - RNA, 20 nt, synthetic construct
  source 1..20: mol_type = other RNA
agggaagaactgtgcctgga

SEQ ID NO: 164 - RNA, 20 nt, synthetic construct
  source 1..20: mol_type = other RNA
agggagagctggcactgctg

SEQ ID NO: 165 - RNA, 20 nt, synthetic construct
  source 1..20: mol_type = other RNA
agggcacagcagtctgccgg

SEQ ID NO: 166 - RNA, 20 nt, synthetic construct
  source 1..20: mol_type = other RNA
agggctgctgcatggcagct

SEQ ID NO: 167 - RNA, 20 nt, synthetic construct
  source 1..20: mol_type = other RNA
aggggcccagggagagctgg

SEQ ID NO: 168 - RNA, 20 nt, synthetic construct
  source 1..20: mol_type = other RNA
aggggtggcagcggtagtgg

SEQ ID NO: 169 - RNA, 20 nt, synthetic construct
  source 1..20: mol_type = other RNA
agggtcccgtccttgacacc

SEQ ID NO: 170 - RNA, 20 nt, synthetic construct
  source 1..20: mol_type = other RNA
aggtaagcctgccggcagac

SEQ ID NO: 171 - RNA, 20 nt, synthetic construct
  source 1..20: mol_type = other RNA
aggtggaagagctgaaacat

SEQ ID NO: 172 - RNA, 20 nt, synthetic construct
  source 1..20: mol_type = other RNA
aggtggtagtggtggcggtg

SEQ ID NO: 173 - RNA, 20 nt, synthetic construct
  source 1..20: mol_type = other RNA
aggtgtcaaggacgggaccc

SEQ ID NO: 174 - RNA, 20 nt, synthetic construct
  source 1..20: mol_type = other RNA
aggttggacagggaagaact

SEQ ID NO: 175 - RNA, 20 nt, synthetic construct
  source 1..20: mol_type = other RNA
agtaaaaccgtttgctgggg

SEQ ID NO: 176 - RNA, 20 nt, synthetic construct
  source 1..20: mol_type = other RNA
agtagatctggggatatggg

SEQ ID NO: 177 - RNA, 20 nt, synthetic construct
  source 1..20: mol_type = other RNA
agtcagcaacagggtcccgt

SEQ ID NO: 178 - RNA, 20 nt, synthetic construct
  source 1..20: mol_type = other RNA
agtcaggccagccccagcaa

SEQ ID NO: 179 - RNA, 20 nt, synthetic construct
  source 1..20: mol_type = other RNA
agtcctgtagaggctgaggt

SEQ ID NO: 180 - RNA, 20 nt, synthetic construct
  source 1..20: mol_type = other RNA
agtctgccggcaggcttacc

SEQ ID NO: 181 - RNA, 20 nt, synthetic construct
  source 1..20: mol_type = other RNA
agtgccagctctccctgggc

SEQ ID NO: 182 - RNA, 20 nt, synthetic construct
  source 1..20: mol_type = other RNA
agtggaggcagtggtggcgg

SEQ ID NO: 183 - RNA, 20 nt, synthetic construct
  source 1..20: mol_type = other RNA
agttctgccagctccttctg

SEQ ID NO: 184 - RNA, 20 nt, synthetic construct
  source 1..20: mol_type = other RNA
agttcttccctgtccaacct

SEQ ID NO: 185 - RNA, 20 nt, synthetic construct
  source 1..20: mol_type = other RNA
ataagagagatccagcttgc

SEQ ID NO: 186 - RNA, 20 nt, synthetic construct
  source 1..20: mol_type = other RNA
atatccccagatctactggg

SEQ ID NO: 187 - RNA, 20 nt, synthetic construct
  source 1..20: mol_type = other RNA
atatgggtaattgaagggct

SEQ ID NO: 188 - RNA, 20 nt, synthetic construct
  source 1..20: mol_type = other RNA
atcacaaggagacacaggcc

SEQ ID NO: 189 - RNA, 20 nt, synthetic construct
  source 1..20: mol_type = other RNA
atccagcttgcctcctcttg

SEQ ID NO: 190 - RNA, 20 nt, synthetic construct
  source 1..20: mol_type = other RNA
atccccagatctactgggtg

SEQ ID NO: 191 - RNA, 20 nt, synthetic construct
  source 1..20: mol_type = other RNA
atccccaggcccaatcctac

SEQ ID NO: 192 - RNA, 20 nt, synthetic construct
  source 1..20: mol_type = other RNA
atcctaccaaggcaaccaga

SEQ ID NO: 193 - RNA, 20 nt, synthetic construct
  source 1..20: mol_type = other RNA
atctactgggtggacagcag

SEQ ID NO: 194 - RNA, 20 nt, synthetic construct
  source 1..20: mol_type = other RNA
atctctcttatagagtttcc

SEQ ID NO: 195 - RNA, 20 nt, synthetic construct
  source 1..20: mol_type = other RNA
atctggggatatgggtaatt

SEQ ID NO: 196 - RNA, 20 nt, synthetic construct
  source 1..20: mol_type = other RNA
atgaaaaacatcacaaggag

SEQ ID NO: 197 - RNA, 20 nt, synthetic construct
  source 1..20: mol_type = other RNA
atgcagcagcccttcaatta

SEQ ID NO: 198 - RNA, 20 nt, synthetic construct
  source 1..20: mol_type = other RNA
atgcctggtgcctccagggc

SEQ ID NO: 199 - RNA, 20 nt, synthetic construct
  source 1..20: mol_type = other RNA
atggaaactctataagagag

SEQ ID NO: 200 - RNA, 20 nt, synthetic construct
  source 1..20: mol_type = other RNA
atggcagctggtgagtcagg

SEQ ID NO: 201 - RNA, 20 nt, synthetic construct
  source 1..20: mol_type = other RNA
atgggtaattgaagggctgc

SEQ ID NO: 202 - RNA, 20 nt, synthetic construct
  source 1..20: mol_type = other RNA
atggttctggttgccttggt

SEQ ID NO: 203 - RNA, 20 nt, synthetic construct
  source 1..20: mol_type = other RNA
atgtttcagctcttccacct

SEQ ID NO: 204 - RNA, 20 nt, synthetic construct
  source 1..20: mol_type = other RNA
atgtttttcatggttctggt

SEQ ID NO: 205 - RNA, 20 nt, synthetic construct
  source 1..20: mol_type = other RNA
attacccatatccccagatc

SEQ ID NO: 206 - RNA, 20 nt, synthetic construct
  source 1..20: mol_type = other RNA
attgaagggctgctgcatgg

SEQ ID NO: 207 - RNA, 20 nt, synthetic construct
  source 1..20: mol_type = other RNA
attgggcctggggatgtttc

SEQ ID NO: 208 - RNA, 20 nt, synthetic construct
  source 1..20: mol_type = other RNA
caaacggttttacttcttct

SEQ ID NO: 209 - RNA, 20 nt, synthetic construct
  source 1..20: mol_type = other RNA
caaaggaggccaccaccacc

SEQ ID NO: 210 - RNA, 20 nt, synthetic construct
  source 1..20: mol_type = other RNA
caacagggtcccgtccttga

SEQ ID NO: 211 - RNA, 20 nt, synthetic construct
  source 1..20: mol_type = other RNA
caaccagaaccatgaaaaac

SEQ ID NO: 212 - RNA, 20 nt, synthetic construct
  source 1..20: mol_type = other RNA
caacctctgtgcccagaagg

SEQ ID NO: 213 - RNA, 20 nt, synthetic construct
  source 1..20: mol_type = other RNA
caagaggaggcaagctggat

SEQ ID NO: 214 - RNA, 20 nt, synthetic construct
  source 1..20: mol_type = other RNA
caagctggatctctcttata

SEQ ID NO: 215 - RNA, 20 nt, synthetic construct
  source 1..20: mol_type = other RNA
caaggacgggaccctgttgc

SEQ ID NO: 216 - RNA, 20 nt, synthetic construct
  source 1..20: mol_type = other RNA
caaggagacacaggcctgtg

SEQ ID NO: 217 - RNA, 20 nt, synthetic construct
  source 1..20: mol_type = other RNA
caaggcaaccagaaccatga

SEQ ID NO: 218 - RNA, 20 nt, synthetic construct
  source 1..20: mol_type = other RNA
caatcctaccaaggcaacca

SEQ ID NO: 219 - RNA, 20 nt, synthetic construct
  source 1..20: mol_type = other RNA
caattacccatatccccaga

SEQ ID NO: 220 - RNA, 20 nt, synthetic construct
  source 1..20: mol_type = other RNA
cacaaggagacacaggcctg

SEQ ID NO: 221 - RNA, 20 nt, synthetic construct
  source 1..20: mol_type = other RNA
cacagaggttggacagggaa

SEQ ID NO: 222 - RNA, 20 nt, synthetic construct
  source 1..20: mol_type = other RNA
cacagcacaggcctgtgtct

SEQ ID NO: 223 - RNA, 20 nt, synthetic construct
  source 1..20: mol_type = other RNA
cacagcagtctgccggcagg

SEQ ID NO: 224 - RNA, 20 nt, synthetic construct
  source 1..20: mol_type = other RNA
cacaggcctgtgctgtggtt

SEQ ID NO: 225 - RNA, 20 nt, synthetic construct
  source 1..20: mol_type = other RNA
cacaggcctgtgtctccttg

SEQ ID NO: 226 - RNA, 20 nt, synthetic construct
  source 1..20: mol_type = other RNA
cacagttcttccctgtccaa

SEQ ID NO: 227 - RNA, 20 nt, synthetic construct
  source 1..20: mol_type = other RNA
caccaccaccgccaccgcca

SEQ ID NO: 228 - RNA, 20 nt, synthetic construct
  source 1..20: mol_type = other RNA
caccaccgccaccgccacca

SEQ ID NO: 229 - RNA, 20 nt, synthetic construct
  source 1..20: mol_type = other RNA
caccactaccacctccgccg

SEQ ID NO: 230 - RNA, 20 nt, synthetic construct
  source 1..20: mol_type = other RNA
caccactgcctccactaccg

SEQ ID NO: 231 - RNA, 20 nt, synthetic construct
  source 1..20: mol_type = other RNA
caccagctgccatgcagcag

SEQ ID NO: 232 - RNA, 20 nt, synthetic construct
  source 1..20: mol_type = other RNA
cacccagtagatctggggat

SEQ ID NO: 233 - RNA, 20 nt, synthetic construct
  source 1..20: mol_type = other RNA
cacccctgaagaagagaggg

SEQ ID NO: 234 - RNA, 20 nt, synthetic construct
  source 1..20: mol_type = other RNA
caccgccaccactaccacct

SEQ ID NO: 235 - RNA, 20 nt, synthetic construct
  source 1..20: mol_type = other RNA
caccgccaccgccaccacta

SEQ ID NO: 236 - RNA, 20 nt, synthetic construct
  source 1..20: mol_type = other RNA
cacctacagaaggagctggc

SEQ ID NO: 237 - RNA, 20 nt, synthetic construct
  source 1..20: mol_type = other RNA
cacctcagcctctacaggac

SEQ ID NO: 238 - RNA, 20 nt, synthetic construct
  source 1..20: mol_type = other RNA
cactaccacctccgccgccg

SEQ ID NO: 239 - RNA, 20 nt, synthetic construct
  source 1..20: mol_type = other RNA
cactaccgctgccacccctg

SEQ ID NO: 240 - RNA, 20 nt, synthetic construct
  source 1..20: mol_type = other RNA
cactgcctccactaccgctg

SEQ ID NO: 241 - RNA, 20 nt, synthetic construct
  source 1..20: mol_type = other RNA
cactgctgtccacccagtag

SEQ ID NO: 242 - RNA, 20 nt, synthetic construct
  source 1..20: mol_type = other RNA
cagaaccatgaaaaacatca

SEQ ID NO: 243 - RNA, 20 nt, synthetic construct
  source 1..20: mol_type = other RNA
cagaactccgagaggtaagc

SEQ ID NO: 244 - RNA, 20 nt, synthetic construct
  source 1..20: mol_type = other RNA
cagaaggagctggcagaact

SEQ ID NO: 245 - RNA, 20 nt, synthetic construct
  source 1..20: mol_type = other RNA
cagaaggcctggtcaaagga

SEQ ID NO: 246 - RNA, 20 nt, synthetic construct
  source 1..20: mol_type = other RNA
cagactgctgtgccctggag

SEQ ID NO: 247 - RNA, 20 nt, synthetic construct
  source 1..20: mol_type = other RNA
cagaggttggacagggaaga

SEQ ID NO: 248 - RNA, 20 nt, synthetic construct
  source 1..20: mol_type = other RNA
cagatctactgggtggacag

SEQ ID NO: 249 - RNA, 20 nt, synthetic construct
  source 1..20: mol_type = other RNA
cagcaaacggttttacttct

SEQ ID NO: 250 - RNA, 20 nt, synthetic construct
  source 1..20: mol_type = other RNA
cagcaacagggtcccgtcct

SEQ ID NO: 251 - RNA, 20 nt, synthetic construct
  source 1..20: mol_type = other RNA
cagcacaggcctgtgtctcc

SEQ ID NO: 252 - RNA, 20 nt, synthetic construct
  source 1..20: mol_type = other RNA
cagcagcccttcaattaccc

SEQ ID NO: 253 - RNA, 20 nt, synthetic construct
  source 1..20: mol_type = other RNA
cagcagtctgccggcaggct

SEQ ID NO: 254 - RNA, 20 nt, synthetic construct
  source 1..20: mol_type = other RNA
cagcagtgccagctctccct

SEQ ID NO: 255 - RNA, 20 nt, synthetic construct
  source 1..20: mol_type = other RNA
cagccccagcaaacggtttt

SEQ ID NO: 256 - RNA, 20 nt, synthetic construct
  source 1..20: mol_type = other RNA
cagcccttcaattacccata

SEQ ID NO: 257 - RNA, 20 nt, synthetic construct
  source 1..20: mol_type = other RNA
cagcctctacaggactgaga

SEQ ID NO: 258 - RNA, 20 nt, synthetic construct
  source 1..20: mol_type = other RNA
cagcggtagtggaggcagtg

SEQ ID NO: 259 - RNA, 20 nt, synthetic construct
  source 1..20: mol_type = other RNA
cagctccttctgtaggtgga

SEQ ID NO: 260 - RNA, 20 nt, synthetic construct
  source 1..20: mol_type = other RNA
cagctctccctgggcccctc

SEQ ID NO: 261 - RNA, 20 nt, synthetic construct
  source 1..20: mol_type = other RNA
cagctcttccacctacagaa

SEQ ID NO: 262 - RNA, 20 nt, synthetic construct
  source 1..20: mol_type = other RNA
cagctgccatgcagcagccc

SEQ ID NO: 263 - RNA, 20 nt, synthetic construct
  source 1..20: mol_type = other RNA
cagctggtgagtcaggccag

SEQ ID NO: 264 - RNA, 20 nt, synthetic construct
  source 1..20: mol_type = other RNA
cagcttgcctcctcttgagc

SEQ ID NO: 265 - RNA, 20 nt, synthetic construct
  source 1..20: mol_type = other RNA
caggactgagaagaagtaaa

SEQ ID NO: 266 - RNA, 20 nt, synthetic construct
  source 1..20: mol_type = other RNA
caggcacagttcttccctgt

SEQ ID NO: 267 - RNA, 20 nt, synthetic construct
  source 1..20: mol_type = other RNA
caggccagccccagcaaacg

SEQ ID NO: 268 - RNA, 20 nt, synthetic construct
  source 1..20: mol_type = other RNA
caggcccaatcctaccaagg

SEQ ID NO: 269 - RNA, 20 nt, synthetic construct
  source 1..20: mol_type = other RNA
caggcctgtgctgtggttcc

SEQ ID NO: 270 - RNA, 20 nt, synthetic construct
  source 1..20: mol_type = other RNA
caggcctgtgtctccttgtg

SEQ ID NO: 271 - RNA, 20 nt, synthetic construct
  source 1..20: mol_type = other RNA
caggccttctgggcacagag

SEQ ID NO: 272 - RNA, 20 nt, synthetic construct
  source 1..20: mol_type = other RNA
caggcttacctctcggagtt

SEQ ID NO: 273 - RNA, 20 nt, synthetic construct
  source 1..20: mol_type = other RNA
cagggaagaactgtgcctgg

SEQ ID NO: 274 - RNA, 20 nt, synthetic construct
  source 1..20: mol_type = other RNA
cagggagagctggcactgct

SEQ ID NO: 275 - RNA, 20 nt, synthetic construct
  source 1..20: mol_type = other RNA
cagggcacagcagtctgccg

SEQ ID NO: 276 - RNA, 20 nt, synthetic construct
  source 1..20: mol_type = other RNA
caggggtggcagcggtagtg

SEQ ID NO: 277 - RNA, 20 nt, synthetic construct
  source 1..20: mol_type = other RNA
cagggtcccgtccttgacac

SEQ ID NO: 278 - RNA, 20 nt, synthetic construct
  source 1..20: mol_type = other RNA
cagtagatctggggatatgg

SEQ ID NO: 279 - RNA, 20 nt, synthetic construct
  source 1..20: mol_type = other RNA
cagtcagcaacagggtcccg

SEQ ID NO: 280 - RNA, 20 nt, synthetic construct
  source 1..20: mol_type = other RNA
cagtcctgtagaggctgagg

SEQ ID NO: 281 - RNA, 20 nt, synthetic construct
  source 1..20: mol_type = other RNA
cagtctgccggcaggcttac

SEQ ID NO: 282 - RNA, 20 nt, synthetic construct
  source 1..20: mol_type = other RNA
cagtgccagctctccctggg

SEQ ID NO: 283 - RNA, 20 nt, synthetic construct
  source 1..20: mol_type = other RNA
cagttcttccctgtccaacc

SEQ ID NO: 284 - RNA, 20 nt, synthetic construct
  source 1..20: mol_type = other RNA
catatccccagatctactgg

SEQ ID NO: 285 - RNA, 20 nt, synthetic construct
  source 1..20: mol_type = other RNA
catcacaaggagacacaggc

SEQ ID NO: 286 - RNA, 20 nt, synthetic construct
  source 1..20: mol_type = other RNA
catccccaggcccaatccta

SEQ ID NO: 287 - RNA, 20 nt, synthetic construct
  source 1..20: mol_type = other RNA
catgaaaaacatcacaagga

SEQ ID NO: 288 - RNA, 20 nt, synthetic construct
  source 1..20: mol_type = other RNA
catgcagcagcccttcaatt

SEQ ID NO: 289 - RNA, 20 nt, synthetic construct
  source 1..20: mol_type = other RNA
catggcagctggtgagtcag

SEQ ID NO: 290 - RNA, 20 nt, synthetic construct
  source 1..20: mol_type = other RNA
catggttctggttgccttgg

SEQ ID NO: 291 - RNA, 20 nt, synthetic construct
  source 1..20: mol_type = other RNA
ccaacctctgtgcccagaag

SEQ ID NO: 292 - RNA, 20 nt, synthetic construct
  source 1..20: mol_type = other RNA
ccaaggcaaccagaaccatg

SEQ ID NO: 293 - RNA, 20 nt, synthetic construct
  source 1..20: mol_type = other RNA
ccaatcctaccaaggcaacc

SEQ ID NO: 294 - RNA, 20 nt, synthetic construct
  source 1..20: mol_type = other RNA
ccacagcacaggcctgtgtc

SEQ ID NO: 295 - RNA, 20 nt, synthetic construct
  source 1..20: mol_type = other RNA
ccaccaccaccgccaccgcc

SEQ ID NO: 296 - RNA, 20 nt, synthetic construct
  source 1..20: mol_type = other RNA
ccaccaccgccaccgccacc

SEQ ID NO: 297 - RNA, 20 nt, synthetic construct
  source 1..20: mol_type = other RNA
ccaccactaccacctccgcc

SEQ ID NO: 298 - RNA, 20 nt, synthetic construct
  source 1..20: mol_type = other RNA
ccaccactgcctccactacc

SEQ ID NO: 299 - RNA, 20 nt, synthetic construct
  source 1..20: mol_type = other RNA
ccacccagtagatctgggga

SEQ ID NO: 300 - RNA, 20 nt, synthetic construct
  source 1..20: mol_type = other RNA
ccacccctgaagaagagagg

SEQ ID NO: 301 - RNA, 20 nt, synthetic construct
  source 1..20: mol_type = other RNA
ccaccgccaccactaccacc

SEQ ID NO: 302 - RNA, 20 nt, synthetic construct
  source 1..20: mol_type = other RNA
ccaccgccaccgccaccact

SEQ ID NO: 303 - RNA, 20 nt, synthetic construct
  source 1..20: mol_type = other RNA
ccacctacagaaggagctgg

SEQ ID NO: 304 - RNA, 20 nt, synthetic construct
  source 1..20: mol_type = other RNA
ccactaccacctccgccgcc

SEQ ID NO: 305 - RNA, 20 nt, synthetic construct
  source 1..20: mol_type = other RNA
ccactaccgctgccacccct

SEQ ID NO: 306 - RNA, 20 nt, synthetic construct
  source 1..20: mol_type = other RNA
ccactgcctccactaccgct

SEQ ID NO: 307 - RNA, 20 nt, synthetic construct
  source 1..20: mol_type = other RNA
ccagaaccatgaaaaacatc

SEQ ID NO: 308 - RNA, 20 nt, synthetic construct
  source 1..20: mol_type = other RNA
ccagaaggcctggtcaaagg

SEQ ID NO: 309 - RNA, 20 nt, synthetic construct
  source 1..20: mol_type = other RNA
ccagatctactgggtggaca

SEQ ID NO: 310 - RNA, 20 nt, synthetic construct
  source 1..20: mol_type = other RNA
ccagcaaacggttttacttc

SEQ ID NO: 311 - RNA, 20 nt, synthetic construct
  source 1..20: mol_type = other RNA
ccagccccagcaaacggttt

SEQ ID NO: 312 - RNA, 20 nt, synthetic construct
  source 1..20: mol_type = other RNA
ccagctccttctgtaggtgg

SEQ ID NO: 313 - RNA, 20 nt, synthetic construct
  source 1..20: mol_type = other RNA
ccagctctccctgggcccct

SEQ ID NO: 314 - RNA, 20 nt, synthetic construct
  source 1..20: mol_type = other RNA
ccagctgccatgcagcagcc

SEQ ID NO: 315 - RNA, 20 nt, synthetic construct
  source 1..20: mol_type = other RNA
ccagcttgcctcctcttgag

SEQ ID NO: 316 - RNA, 20 nt, synthetic construct
  source 1..20: mol_type = other RNA
ccaggcacagttcttccctg

SEQ ID NO: 317 - RNA, 20 nt, synthetic construct
  source 1..20: mol_type = other RNA
ccaggcccaatcctaccaag

SEQ ID NO: 318 - RNA, 20 nt, synthetic construct
  source 1..20: mol_type = other RNA
ccaggccttctgggcacaga

SEQ ID NO: 319 - RNA, 20 nt, synthetic construct
  source 1..20: mol_type = other RNA
ccagggagagctggcactgc

SEQ ID NO: 320 - RNA, 20 nt, synthetic construct
  source 1..20: mol_type = other RNA
ccagggcacagcagtctgcc

SEQ ID NO: 321 - RNA, 20 nt, synthetic construct
  source 1..20: mol_type = other RNA
ccagtagatctggggatatg

SEQ ID NO: 322 - RNA, 20 nt, synthetic construct
  source 1..20: mol_type = other RNA
ccatatccccagatctactg

SEQ ID NO: 323 - RNA, 20 nt, synthetic construct
  source 1..20: mol_type = other RNA
ccatgaaaaacatcacaagg

SEQ ID NO: 324 - RNA, 20 nt, synthetic construct
  source 1..20: mol_type = other RNA
ccatgcagcagcccttcaat

SEQ ID NO: 325 - RNA, 20 nt, synthetic construct
  source 1..20: mol_type = other RNA
cccaatcctaccaaggcaac

SEQ ID NO: 326 - RNA, 20 nt, synthetic construct
  source 1..20: mol_type = other RNA
cccagaaggcctggtcaaag

SEQ ID NO: 327 - RNA, 20 nt, synthetic construct
  source 1..20: mol_type = other RNA
cccagatctactgggtggac

SEQ ID NO: 328 - RNA, 20 nt, synthetic construct
  source 1..20: mol_type = other RNA
cccagcaaacggttttactt

SEQ ID NO: 329 - RNA, 20 nt, synthetic construct
  source 1..20: mol_type = other RNA
cccaggcccaatcctaccaa

SEQ ID NO: 330 - RNA, 20 nt, synthetic construct
  source 1..20: mol_type = other RNA
cccagggagagctggcactg

SEQ ID NO: 331 - RNA, 20 nt, synthetic construct
  source 1..20: mol_type = other RNA
cccagtagatctggggatat

SEQ ID NO: 332 - RNA, 20 nt, synthetic construct
  source 1..20: mol_type = other RNA
cccatatccccagatctact

SEQ ID NO: 333 - RNA, 20 nt, synthetic construct
  source 1..20: mol_type = other RNA
ccccagatctactgggtgga

SEQ ID NO: 334 - RNA, 20 nt, synthetic construct
  source 1..20: mol_type = other RNA
ccccagcaaacggttttact

SEQ ID NO: 335 - RNA, 20 nt, synthetic construct
  source 1..20: mol_type = other RNA
ccccaggcccaatcctacca

SEQ ID NO: 336 - RNA, 20 nt, synthetic construct
  source 1..20: mol_type = other RNA
cccctccaggcacagttctt

SEQ ID NO: 337 - RNA, 20 nt, synthetic construct
  source 1..20: mol_type = other RNA
cccctgaagaagagagggaa

SEQ ID NO: 338 - RNA, 20 nt, synthetic construct
  source 1..20: mol_type = other RNA
cccgtccttgacacctcagc

SEQ ID NO: 339 - RNA, 20 nt, synthetic construct
  source 1..20: mol_type = other RNA
ccctccaggcacagttcttc

SEQ ID NO: 340 - RNA, 20 nt, synthetic construct
  source 1..20: mol_type = other RNA
ccctctcttcttcaggggtg

SEQ ID NO: 341 - RNA, 20 nt, synthetic construct
  source 1..20: mol_type = other RNA
ccctgaagaagagagggaac

SEQ ID NO: 342 - RNA, 20 nt, synthetic construct
  source 1..20: mol_type = other RNA
ccctgggcccctccaggcac

SEQ ID NO: 343 - RNA, 20 nt, synthetic construct
  source 1..20: mol_type = other RNA
ccctgtccaacctctgtgcc

SEQ ID NO: 344 - RNA, 20 nt, synthetic construct
  source 1..20: mol_type = other RNA
ccctgttgctgactgctcaa

SEQ ID NO: 345 - RNA, 20 nt, synthetic construct
  source 1..20: mol_type = other RNA
cccttcaattacccatatcc

SEQ ID NO: 346 - RNA, 20 nt, synthetic construct
  source 1..20: mol_type = other RNA
ccgagaggtaagcctgccgg

SEQ ID NO: 347 - RNA, 20 nt, synthetic construct
  source 1..20: mol_type = other RNA
ccgccaccactaccacctcc

SEQ ID NO: 348 - RNA, 20 nt, synthetic construct
  source 1..20: mol_type = other RNA
ccgccaccactgcctccact

SEQ ID NO: 349 - RNA, 20 nt, synthetic construct
  source 1..20: mol_type = other RNA
ccgccaccgccaccactacc

SEQ ID NO: 350 - RNA, 20 nt, synthetic construct
  source 1..20: mol_type = other RNA
ccgccgccaccactgcctcc

SEQ ID NO: 351 - RNA, 20 nt, synthetic construct
  source 1..20: mol_type = other RNA
ccgctgccacccctgaagaa

SEQ ID NO: 352 - RNA, 20 nt, synthetic construct
  source 1..20: mol_type = other RNA
ccggcagactgctgtgccct

SEQ ID NO: 353 - RNA, 20 nt, synthetic construct
  source 1..20: mol_type = other RNA
ccggcaggcttacctctcgg

SEQ ID NO: 354 - RNA, 20 nt, synthetic construct
  source 1..20: mol_type = other RNA
ccgtccttgacacctcagcc

SEQ ID NO: 355 - RNA, 20 nt, synthetic construct
  source 1..20: mol_type = other RNA
ccgtttgctggggctggcct

SEQ ID NO: 356 - RNA, 20 nt, synthetic construct
  source 1..20: mol_type = other RNA
cctacagaaggagctggcag

SEQ ID NO: 357 - RNA, 20 nt, synthetic construct
  source 1..20: mol_type = other RNA
cctaccaaggcaaccagaac

SEQ ID NO: 358 - RNA, 20 nt, synthetic construct
  source 1..20: mol_type = other RNA
cctcagcctctacaggactg

SEQ ID NO: 359 - RNA, 20 nt, synthetic construct
  source 1..20: mol_type = other RNA
cctccactaccgctgccacc

SEQ ID NO: 360 - RNA, 20 nt, synthetic construct
  source 1..20: mol_type = other RNA
cctccaggcacagttcttcc

SEQ ID NO: 361 - RNA, 20 nt, synthetic construct
  source 1..20: mol_type = other RNA
cctccagggcacagcagtct

SEQ ID NO: 362 - RNA, 20 nt, synthetic construct
  source 1..20: mol_type = other RNA
cctcctcttgagcagtcagc

SEQ ID NO: 363 - RNA, 20 nt, synthetic construct
  source 1..20: mol_type = other RNA
cctcctttgaccaggccttc

SEQ ID NO: 364 - RNA, 20 nt, synthetic construct
  source 1..20: mol_type = other RNA
cctctacaggactgagaaga

SEQ ID NO: 365 - RNA, 20 nt, synthetic construct
  source 1..20: mol_type = other RNA
cctctcggagttctgccagc

SEQ ID NO: 366 - RNA, 20 nt, synthetic construct
  source 1..20: mol_type = other RNA
cctctcttcttcaggggtgg

SEQ ID NO: 367 - RNA, 20 nt, synthetic construct
  source 1..20: mol_type = other RNA
cctctgtgcccagaaggcct

SEQ ID NO: 368 - RNA, 20 nt, synthetic construct
  source 1..20: mol_type = other RNA
cctcttgagcagtcagcaac

SEQ ID NO: 369 - RNA, 20 nt, synthetic construct
  source 1..20: mol_type = other RNA
cctgaagaagagagggaacc

SEQ ID NO: 370 - RNA, 20 nt, synthetic construct
  source 1..20: mol_type = other RNA
cctgactcaccagctgccat

SEQ ID NO: 371 - RNA, 20 nt, synthetic construct
  source 1..20: mol_type = other RNA
cctgccggcagactgctgtg

SEQ ID NO: 372 - RNA, 20 nt, synthetic construct
  source 1..20: mol_type = other RNA
cctggaggggcccagggaga

SEQ ID NO: 373 - RNA, 20 nt, synthetic construct
  source 1..20: mol_type = other RNA
cctgggcccctccaggcaca

SEQ ID NO: 374 - RNA, 20 nt, synthetic construct
  source 1..20: mol_type = other RNA
cctggggatgtttcagctct

SEQ ID NO: 375 - RNA, 20 nt, synthetic construct
  source 1..20: mol_type = other RNA
cctggtcaaaggaggccacc

SEQ ID NO: 376 - RNA, 20 nt, synthetic construct
  source 1..20: mol_type = other RNA
cctggtgcctccagggcaca

SEQ ID NO: 377 - RNA, 20 nt, synthetic construct
  source 1..20: mol_type = other RNA
cctgtagaggctgaggtgtc

SEQ ID NO: 378 - RNA, 20 nt, synthetic construct
  source 1..20: mol_type = other RNA
cctgtccaacctctgtgccc

SEQ ID NO: 379 - RNA, 20 nt, synthetic construct
  source 1..20: mol_type = other RNA
cctgtgctgtggttccctct

SEQ ID NO: 380 - RNA, 20 nt, synthetic construct
  source 1..20: mol_type = other RNA
cctgtgtctccttgtgatgt

SEQ ID NO: 381 - RNA, 20 nt, synthetic construct
  source 1..20: mol_type = other RNA
cctgttgctgactgctcaag

SEQ ID NO: 382 - RNA, 20 nt, synthetic construct
  source 1..20: mol_type = other RNA
ccttcaattacccatatccc

SEQ ID NO: 383 - RNA, 20 nt, synthetic construct
  source 1..20: mol_type = other RNA
ccttctgggcacagaggttg

SEQ ID NO: 384 - RNA, 20 nt, synthetic construct
  source 1..20: mol_type = other RNA
ccttctgtaggtggaagagc

SEQ ID NO: 385 - RNA, 20 nt, synthetic construct
  source 1..20: mol_type = other RNA
ccttgacacctcagcctcta

SEQ ID NO: 386 - RNA, 20 nt, synthetic construct
  source 1..20: mol_type = other RNA
ccttggtaggattgggcctg

SEQ ID NO: 387 - RNA, 20 nt, synthetic construct
  source 1..20: mol_type = other RNA
ccttgtgatgtttttcatgg

SEQ ID NO: 388 - RNA, 20 nt, synthetic construct
  source 1..20: mol_type = other RNA
cctttgaccaggccttctgg

SEQ ID NO: 389 - RNA, 20 nt, synthetic construct
  source 1..20: mol_type = other RNA
cgagaggtaagcctgccggc

SEQ ID NO: 390 - RNA, 20 nt, synthetic construct
  source 1..20: mol_type = other RNA
cgccaccactaccacctccg

SEQ ID NO: 391 - RNA, 20 nt, synthetic construct
  source 1..20: mol_type = other RNA
cgccaccactgcctccacta

SEQ ID NO: 392 - RNA, 20 nt, synthetic construct
  source 1..20: mol_type = other RNA
cgccaccgccaccactacca

SEQ ID NO: 393 - RNA, 20 nt, synthetic construct
  source 1..20: mol_type = other RNA
cgccgccaccactgcctcca

SEQ ID NO: 394 - RNA, 20 nt, synthetic construct
  source 1..20: mol_type = other RNA
cgccgccgccaccactgcct

SEQ ID NO: 395 - RNA, 20 nt, synthetic construct
  source 1..20: mol_type = other RNA
cgctgccacccctgaagaag

SEQ ID NO: 396 - RNA, 20 nt, synthetic construct
  source 1..20: mol_type = other RNA
cggaggtggtagtggtggcg

SEQ ID NO: 397 - RNA, 20 nt, synthetic construct
  source 1..20: mol_type = other RNA
cggagttctgccagctcctt

SEQ ID NO: 398 - RNA, 20 nt, synthetic construct
  source 1..20: mol_type = other RNA
cggcagactgctgtgccctg

SEQ ID NO: 399 - RNA, 20 nt, synthetic construct
  source 1..20: mol_type = other RNA
cggcaggcttacctctcgga

SEQ ID NO: 400 - RNA, 20 nt, synthetic construct
  source 1..20: mol_type = other RNA
cggcggaggtggtagtggtg

SEQ ID NO: 401 - RNA, 20 nt, synthetic construct
  source 1..20: mol_type = other RNA
cggcggcggaggtggtagtg

SEQ ID NO: 402 - RNA, 20 nt, synthetic construct
  source 1..20: mol_type = other RNA
cggcggcggcggaggtggta

SEQ ID NO: 403 - RNA, 20 nt, synthetic construct
  source 1..20: mol_type = other RNA
cgggaccctgttgctgactg

SEQ ID NO: 404 - RNA, 20 nt, synthetic construct
  source 1..20: mol_type = other RNA
cggtagtggaggcagtggtg

SEQ ID NO: 405 - RNA, 20 nt, synthetic construct
  source 1..20: mol_type = other RNA
cggtggcggtggtggtggtg

SEQ ID NO: 406 - RNA, 20 nt, synthetic construct
  source 1..20: mol_type = other RNA
cggtggtggtggtggcctcc

SEQ ID NO: 407 - RNA, 20 nt, synthetic construct
  source 1..20: mol_type = other RNA
cggttttacttcttctcagt

SEQ ID NO: 408 - RNA, 20 nt, synthetic construct
  source 1..20: mol_type = other RNA
cgtccttgacacctcagcct

SEQ ID NO: 409 - RNA, 20 nt, synthetic construct
  source 1..20: mol_type = other RNA
cgtttgctggggctggcctg

SEQ ID NO: 410 - RNA, 20 nt, synthetic construct
  source 1..20: mol_type = other RNA
ctacagaaggagctggcaga

SEQ ID NO: 411 - RNA, 20 nt, synthetic construct
  source 1..20: mol_type = other RNA
ctacaggactgagaagaagt

SEQ ID NO: 412 - RNA, 20 nt, synthetic construct
  source 1..20: mol_type = other RNA
ctaccaaggcaaccagaacc

SEQ ID NO: 413 - RNA, 20 nt, synthetic construct
  source 1..20: mol_type = other RNA
ctaccacctccgccgccgcc

SEQ ID NO: 414 - RNA, 20 nt, synthetic construct
  source 1..20: mol_type = other RNA
ctaccgctgccacccctgaa

SEQ ID NO: 415 - RNA, 20 nt, synthetic construct
  source 1..20: mol_type = other RNA
ctactgggtggacagcagtg

SEQ ID NO: 416 - RNA, 20 nt, synthetic construct
  source 1..20: mol_type = other RNA
ctataagagagatccagctt

SEQ ID NO: 417 - RNA, 20 nt, synthetic construct
  source 1..20: mol_type = other RNA
ctatggaaactctataagag

SEQ ID NO: 418 - RNA, 20 nt, synthetic construct
  source 1..20: mol_type = other RNA
ctcaagaggaggcaagctgg

SEQ ID NO: 419 - RNA, 20 nt, synthetic construct
  source 1..20: mol_type = other RNA
ctcaccagctgccatgcagc

SEQ ID NO: 420 - RNA, 20 nt, synthetic construct
  source 1..20: mol_type = other RNA
ctcagcctctacaggactga

SEQ ID NO: 421 - RNA, 20 nt, synthetic construct
  source 1..20: mol_type = other RNA
ctcagtcctgtagaggctga

SEQ ID NO: 422 - RNA, 20 nt, synthetic construct
  source 1..20: mol_type = other RNA
ctccactaccgctgccaccc

SEQ ID NO: 423 - RNA, 20 nt, synthetic construct
  source 1..20: mol_type = other RNA
ctccaggcacagttcttccc

SEQ ID NO: 424 - RNA, 20 nt, synthetic construct
  source 1..20: mol_type = other RNA
ctccagggcacagcagtctg

SEQ ID NO: 425 - RNA, 20 nt, synthetic construct
  source 1..20: mol_type = other RNA
ctccctgggcccctccaggc

SEQ ID NO: 426 - RNA, 20 nt, synthetic construct
  source 1..20: mol_type = other RNA
ctccgagaggtaagcctgcc

SEQ ID NO: 427 - RNA, 20 nt, synthetic construct
  source 1..20: mol_type = other RNA
ctcctcttgagcagtcagca

SEQ ID NO: 428 - RNA, 20 nt, synthetic construct
  source 1..20: mol_type = other RNA
ctccttctgtaggtggaaga

SEQ ID NO: 429 - RNA, 20 nt, synthetic construct
  source 1..20: mol_type = other RNA
ctccttgtgatgtttttcat

SEQ ID NO: 430 - RNA, 20 nt, synthetic construct
  source 1..20: mol_type = other RNA
ctcctttgaccaggccttct

SEQ ID NO: 431 - RNA, 20 nt, synthetic construct
  source 1..20: mol_type = other RNA
ctcggagttctgccagctcc

SEQ ID NO: 432 - RNA, 20 nt, synthetic construct
  source 1..20: mol_type = other RNA
ctctacaggactgagaagaa

SEQ ID NO: 433 - RNA, 20 nt, synthetic construct
  source 1..20: mol_type = other RNA
ctctataagagagatccagc

SEQ ID NO: 434 - RNA, 20 nt, synthetic construct
  source 1..20: mol_type = other RNA
ctctccctgggcccctccag

SEQ ID NO: 435 - RNA, 20 nt, synthetic construct
  source 1..20: mol_type = other RNA
ctctcggagttctgccagct

SEQ ID NO: 436 - RNA, 20 nt, synthetic construct
  source 1..20: mol_type = other RNA
ctctcttcttcaggggtggc

SEQ ID NO: 437 - RNA, 20 nt, synthetic construct
  source 1..20: mol_type = other RNA
ctctgtgcccagaaggcctg

SEQ ID NO: 438 - RNA, 20 nt, synthetic construct
  source 1..20: mol_type = other RNA
ctcttccacctacagaagga

SEQ ID NO: 439 - RNA, 20 nt, synthetic construct
  source 1..20: mol_type = other RNA
ctcttcttcaggggtggcag

SEQ ID NO: 440 - RNA, 20 nt, synthetic construct
  source 1..20: mol_type = other RNA
ctcttgagcagtcagcaaca

SEQ ID NO: 441 - RNA, 20 nt, synthetic construct
  source 1..20: mol_type = other RNA
ctgaaacatccccaggccca

SEQ ID NO: 442 - RNA, 20 nt, synthetic construct
  source 1..20: mol_type = other RNA
ctgaagaagagagggaacca

SEQ ID NO: 443 - RNA, 20 nt, synthetic construct
  source 1..20: mol_type = other RNA
ctgactcaccagctgccatg

SEQ ID NO: 444 - RNA, 20 nt, synthetic construct
  source 1..20: mol_type = other RNA
ctgactgctcaagaggaggc

SEQ ID NO: 445 - RNA, 20 nt, synthetic construct
  source 1..20: mol_type = other RNA
ctgagaagaagtaaaaccgt

SEQ ID NO: 446 - RNA, 20 nt, synthetic construct
  source 1..20: mol_type = other RNA
ctgaggtgtcaaggacggga

SEQ ID NO: 447 - RNA, 20 nt, synthetic construct
  source 1..20: mol_type = other RNA
ctgcatggcagctggtgagt

SEQ ID NO: 448 - RNA, 20 nt, synthetic construct
  source 1..20: mol_type = other RNA
ctgccacccctgaagaagag

SEQ ID NO: 449 - RNA, 20 nt, synthetic construct
  source 1..20: mol_type = other RNA
ctgccagctccttctgtagg

SEQ ID NO: 450 - RNA, 20 nt, synthetic construct
  source 1..20: mol_type = other RNA
ctgccatgcagcagcccttc

SEQ ID NO: 451 - RNA, 20 nt, synthetic construct
  source 1..20: mol_type = other RNA
ctgccggcagactgctgtgc

SEQ ID NO: 452 - RNA, 20 nt, synthetic construct
  source 1..20: mol_type = other RNA
ctgccggcaggcttacctct

SEQ ID NO: 453 - RNA, 20 nt, synthetic construct
  source 1..20: mol_type = other RNA
ctgcctccactaccgctgcc

SEQ ID NO: 454 - RNA, 20 nt, synthetic construct
  source 1..20: mol_type = other RNA
ctgctcaagaggaggcaagc

SEQ ID NO: 455 - RNA, 20 nt, synthetic construct
  source 1..20: mol_type = other RNA
ctgctgcatggcagctggtg

SEQ ID NO: 456 - RNA, 20 nt, synthetic construct
  source 1..20: mol_type = other RNA
ctgctgtccacccagtagat

SEQ ID NO: 457 - RNA, 20 nt, synthetic construct
  source 1..20: mol_type = other RNA
ctgctgtgccctggaggcac

SEQ ID NO: 458 - RNA, 20 nt, synthetic construct
  source 1..20: mol_type = other RNA
ctggaggggcccagggagag

SEQ ID NO: 459 - RNA, 20 nt, synthetic construct
  source 1..20: mol_type = other RNA
ctggatctctcttatagagt

SEQ ID NO: 460 - RNA, 20 nt, synthetic construct
  source 1..20: mol_type = other RNA
ctggcactgctgtccaccca

SEQ ID NO: 461 - RNA, 20 nt, synthetic construct
  source 1..20: mol_type = other RNA
ctggcagaactccgagaggt

SEQ ID NO: 462 - RNA, 20 nt, synthetic construct
  source 1..20: mol_type = other RNA
ctggcctgactcaccagctg

SEQ ID NO: 463 - RNA, 20 nt, synthetic construct
  source 1..20: mol_type = other RNA
ctgggcacagaggttggaca

SEQ ID NO: 464 - RNA, 20 nt, synthetic construct
  source 1..20: mol_type = other RNA
ctgggcccctccaggcacag

SEQ ID NO: 465 - RNA, 20 nt, synthetic construct
  source 1..20: mol_type = other RNA
ctggggatatgggtaattga

SEQ ID NO: 466 - RNA, 20 nt, synthetic construct
  source 1..20: mol_type = other RNA
ctggggatgtttcagctctt

SEQ ID NO: 467 - RNA, 20 nt, synthetic construct
  source 1..20: mol_type = other RNA
ctggggctggcctgactcac

SEQ ID NO: 468 - RNA, 20 nt, synthetic construct
  source 1..20: mol_type = other RNA
ctgggtggacagcagtgcca

SEQ ID NO: 469 - RNA, 20 nt, synthetic construct
  source 1..20: mol_type = other RNA
ctggtcaaaggaggccacca

SEQ ID NO: 470 - RNA, 20 nt, synthetic construct
  source 1..20: mol_type = other RNA
ctggtgagtcaggccagccc

SEQ ID NO: 471 - RNA, 20 nt, synthetic construct
  source 1..20: mol_type = other RNA
ctggtgcctccagggcacag

SEQ ID NO: 472 - RNA, 20 nt, synthetic construct
  source 1..20: mol_type = other RNA
ctggttgccttggtaggatt

SEQ ID NO: 473 - RNA, 20 nt, synthetic construct
  source 1..20: mol_type = other RNA
ctgtagaggctgaggtgtca

SEQ ID NO: 474 - RNA, 20 nt, synthetic construct
  source 1..20: mol_type = other RNA
ctgtaggtggaagagctgaa

SEQ ID NO: 475 - RNA, 20 nt, synthetic construct
  source 1..20: mol_type = other RNA
ctgtccaacctctgtgccca

SEQ ID NO: 476 - RNA, 20 nt, synthetic construct
  source 1..20: mol_type = other RNA
ctgtccacccagtagatctg

SEQ ID NO: 477 - RNA, 20 nt, synthetic construct
  source 1..20: mol_type = other RNA
ctgtgcccagaaggcctggt

SEQ ID NO: 478 - RNA, 20 nt, synthetic construct
  source 1..20: mol_type = other RNA
ctgtgcctggaggggcccag

SEQ ID NO: 479 - RNA, 20 nt, synthetic construct
  source 1..20: mol_type = other RNA
ctgtgctgtggttccctctc

SEQ ID NO: 480 - RNA, 20 nt, synthetic construct
  source 1..20: mol_type = other RNA
ctgtggttccctctcttctt

SEQ ID NO: 481 - RNA, 20 nt, synthetic construct
  source 1..20: mol_type = other RNA
ctgtgtctccttgtgatgtt

SEQ ID NO: 482 - RNA, 20 nt, synthetic construct
  source 1..20: mol_type = other RNA
ctgttgctgactgctcaaga

SEQ ID NO: 483 - RNA, 20 nt, synthetic construct
  source 1..20: mol_type = other RNA
cttacctctcggagttctgc

SEQ ID NO: 484 - RNA, 20 nt, synthetic construct
  source 1..20: mol_type = other RNA
cttcaattacccatatcccc

SEQ ID NO: 485 - RNA, 20 nt, synthetic construct
  source 1..20: mol_type = other RNA
cttcaggggtggcagcggta

SEQ ID NO: 486 - RNA, 20 nt, synthetic construct
  source 1..20: mol_type = other RNA
cttccacctacagaaggagc

SEQ ID NO: 487 - RNA, 20 nt, synthetic construct
  source 1..20: mol_type = other RNA
cttccctgtccaacctctgt

SEQ ID NO: 488 - RNA, 20 nt, synthetic construct
  source 1..20: mol_type = other RNA
cttctcagtcctgtagaggc

SEQ ID NO: 489 - RNA, 20 nt, synthetic construct
  source 1..20: mol_type = other RNA
cttctgggcacagaggttgg

SEQ ID NO: 490 - RNA, 20 nt, synthetic construct
  source 1..20: mol_type = other RNA
cttctgtaggtggaagagct

SEQ ID NO: 491 - RNA, 20 nt, synthetic construct
  source 1..20: mol_type = other RNA
cttcttcaggggtggcagcg

SEQ ID NO: 492 - RNA, 20 nt, synthetic construct
  source 1..20: mol_type = other RNA
cttcttctcagtcctgtaga

SEQ ID NO: 493 - RNA, 20 nt, synthetic construct
  source 1..20: mol_type = other RNA
cttgacacctcagcctctac

SEQ ID NO: 494 - RNA, 20 nt, synthetic construct
  source 1..20: mol_type = other RNA
cttgagcagtcagcaacagg

SEQ ID NO: 495 - RNA, 20 nt, synthetic construct
  source 1..20: mol_type = other RNA
cttgcctcctcttgagcagt

SEQ ID NO: 496 - RNA, 20 nt, synthetic construct
  source 1..20: mol_type = other RNA
cttggtaggattgggcctgg

SEQ ID NO: 497 - RNA, 20 nt, synthetic construct
  source 1..20: mol_type = other RNA
cttgtgatgtttttcatggt

SEQ ID NO: 498 - RNA, 20 nt, synthetic construct
  source 1..20: mol_type = other RNA
ctttgaccaggccttctggg

SEQ ID NO: 499 - RNA, 20 nt, synthetic construct
  source 1..20: mol_type = other RNA
gaaaaacatcacaaggagac

SEQ ID NO: 500 - RNA, 20 nt, synthetic construct
  source 1..20: mol_type = other RNA
gaaacatccccaggcccaat

SEQ ID NO: 501 - RNA, 20 nt, synthetic construct
  source 1..20: mol_type = other RNA
gaaactctataagagagatc

SEQ ID NO: 502 - RNA, 20 nt, synthetic construct
  source 1..20: mol_type = other RNA
gaaccacagcacaggcctgt

SEQ ID NO: 503 - RNA, 20 nt, synthetic construct
  source 1..20: mol_type = other RNA
gaaccatgaaaaacatcaca

SEQ ID NO: 504 - RNA, 20 nt, synthetic construct
  source 1..20: mol_type = other RNA
gaactccgagaggtaagcct

SEQ ID NO: 505 - RNA, 20 nt, synthetic construct
  source 1..20: mol_type = other RNA
gaactgtgcctggaggggcc

SEQ ID NO: 506 - RNA, 20 nt, synthetic construct
  source 1..20: mol_type = other RNA
gaagaactgtgcctggaggg

SEQ ID NO: 507 - RNA, 20 nt, synthetic construct
  source 1..20: mol_type = other RNA
gaagaagagagggaaccaca

SEQ ID NO: 508 - RNA, 20 nt, synthetic construct
  source 1..20: mol_type = other RNA
gaagaagtaaaaccgtttgc

SEQ ID NO: 509 - RNA, 20 nt, synthetic construct
  source 1..20: mol_type = other RNA
gaagagagggaaccacagca

SEQ ID NO: 510 - RNA, 20 nt, synthetic construct
  source 1..20: mol_type = other RNA
gaagagctgaaacatcccca

SEQ ID NO: 511 - RNA, 20 nt, synthetic construct
  source 1..20: mol_type = other RNA
gaaggagctggcagaactcc

SEQ ID NO: 512 - RNA, 20 nt, synthetic construct
  source 1..20: mol_type = other RNA
gaaggcctggtcaaaggagg

SEQ ID NO: 513 - RNA, 20 nt, synthetic construct
  source 1..20: mol_type = other RNA
gaagggctgctgcatggcag

SEQ ID NO: 514 - RNA, 20 nt, synthetic construct
  source 1..20: mol_type = other RNA
gaagtaaaaccgtttgctgg

SEQ ID NO: 515 - RNA, 20 nt, synthetic construct
  source 1..20: mol_type = other RNA
gacacaggcctgtgctgtgg

SEQ ID NO: 516 - RNA, 20 nt, synthetic construct
  source 1..20: mol_type = other RNA
gacacctcagcctctacagg

SEQ ID NO: 517 - RNA, 20 nt, synthetic construct
  source 1..20: mol_type = other RNA
gacagcagtgccagctctcc

SEQ ID NO: 518 - RNA, 20 nt, synthetic construct
  source 1..20: mol_type = other RNA
gacagggaagaactgtgcct

SEQ ID NO: 519 - RNA, 20 nt, synthetic construct
  source 1..20: mol_type = other RNA
gaccaggccttctgggcaca

SEQ ID NO: 520 - RNA, 20 nt, synthetic construct
  source 1..20: mol_type = other RNA
gaccctgttgctgactgctc

SEQ ID NO: 521 - RNA, 20 nt, synthetic construct
  source 1..20: mol_type = other RNA
gacgggaccctgttgctgac

SEQ ID NO: 522 - RNA, 20 nt, synthetic construct
  source 1..20: mol_type = other RNA
gactcaccagctgccatgca

SEQ ID NO: 523 - RNA, 20 nt, synthetic construct
  source 1..20: mol_type = other RNA
gactgagaagaagtaaaacc

SEQ ID NO: 524 - RNA, 20 nt, synthetic construct
  source 1..20: mol_type = other RNA
gactgctcaagaggaggcaa

SEQ ID NO: 525 - RNA, 20 nt, synthetic construct
  source 1..20: mol_type = other RNA
gactgctgtgccctggaggc

SEQ ID NO: 526 - RNA, 20 nt, synthetic construct
  source 1..20: mol_type = other RNA
gagaagaagtaaaaccgttt

SEQ ID NO: 527 - RNA, 20 nt, synthetic construct
  source 1..20: mol_type = other RNA
gagacacaggcctgtgctgt

SEQ ID NO: 528 - RNA, 20 nt, synthetic construct
  source 1..20: mol_type = other RNA
gagagatccagcttgcctcc

SEQ ID NO: 529 - RNA, 20 nt, synthetic construct
  source 1..20: mol_type = other RNA
gagagctggcactgctgtcc

SEQ ID NO: 530 - RNA, 20 nt, synthetic construct
  source 1..20: mol_type = other RNA
gagagggaaccacagcacag

SEQ ID NO: 531 - RNA, 20 nt, synthetic construct
  source 1..20: mol_type = other RNA
gagaggtaagcctgccggca

SEQ ID NO: 532 - RNA, 20 nt, synthetic construct
  source 1..20: mol_type = other RNA
gagatccagcttgcctcctc

SEQ ID NO: 533 - RNA, 20 nt, synthetic construct
  source 1..20: mol_type = other RNA
gagcagtcagcaacagggtc

SEQ ID NO: 534 - RNA, 20 nt, synthetic construct
  source 1..20: mol_type = other RNA
gagctgaaacatccccaggc

SEQ ID NO: 535 - RNA, 20 nt, synthetic construct
  source 1..20: mol_type = other RNA
gagctggcactgctgtccac

SEQ ID NO: 536 - RNA, 20 nt, synthetic construct
  source 1..20: mol_type = other RNA
gagctggcagaactccgaga

SEQ ID NO: 537 - RNA, 20 nt, synthetic construct
  source 1..20: mol_type = other RNA
gaggaggcaagctggatctc

SEQ ID NO: 538 - RNA, 20 nt, synthetic construct
  source 1..20: mol_type = other RNA
gaggcaagctggatctctct

SEQ ID NO: 539 - RNA, 20 nt, synthetic construct
  source 1..20: mol_type = other RNA
gaggcagtggtggcggcggc

SEQ ID NO: 540 - RNA, 20 nt, synthetic construct
  source 1..20: mol_type = other RNA
gaggccaccaccaccaccgc

SEQ ID NO: 541 - RNA, 20 nt, synthetic construct
  source 1..20: mol_type = other RNA
gaggctgaggtgtcaaggac

SEQ ID NO: 542 - RNA, 20 nt, synthetic construct
  source 1..20: mol_type = other RNA
gagggaaccacagcacaggc

SEQ ID NO: 543 - RNA, 20 nt, synthetic construct
  source 1..20: mol_type = other RNA
gaggggcccagggagagctg

SEQ ID NO: 544 - RNA, 20 nt, synthetic construct
  source 1..20: mol_type = other RNA
gaggtaagcctgccggcaga

SEQ ID NO: 545 - RNA, 20 nt, synthetic construct
  source 1..20: mol_type = other RNA
gaggtggtagtggtggcggt

SEQ ID NO: 546 - RNA, 20 nt, synthetic construct
  source 1..20: mol_type = other RNA
gaggtgtcaaggacgggacc

SEQ ID NO: 547 - RNA, 20 nt, synthetic construct
  source 1..20: mol_type = other RNA
gaggttggacagggaagaac

SEQ ID NO: 548 - RNA, 20 nt, synthetic construct
  source 1..20: mol_type = other RNA
gagtcaggccagccccagca

SEQ ID NO: 549 - RNA, 20 nt, synthetic construct
  source 1..20: mol_type = other RNA
gagttctgccagctccttct

SEQ ID NO: 550 - RNA, 20 nt, synthetic construct
  source 1..20: mol_type = other RNA
gatatgggtaattgaagggc

SEQ ID NO: 551 - RNA, 20 nt, synthetic construct
  source 1..20: mol_type = other RNA
gatccagcttgcctcctctt

SEQ ID NO: 552 - RNA, 20 nt, synthetic construct
  source 1..20: mol_type = other RNA
gatctactgggtggacagca

SEQ ID NO: 553 - RNA, 20 nt, synthetic construct
  source 1..20: mol_type = other RNA
gatctctcttatagagtttc

SEQ ID NO: 554 - RNA, 20 nt, synthetic construct
  source 1..20: mol_type = other RNA
gatctggggatatgggtaat

SEQ ID NO: 555 - RNA, 20 nt, synthetic construct
  source 1..20: mol_type = other RNA
gatgtttcagctcttccacc

SEQ ID NO: 556 - RNA, 20 nt, synthetic construct
  source 1..20: mol_type = other RNA
gatgtttttcatggttctgg

SEQ ID NO: 557 - RNA, 20 nt, synthetic construct
  source 1..20: mol_type = other RNA
gattgggcctggggatgttt

SEQ ID NO: 558 - RNA, 20 nt, synthetic construct
  source 1..20: mol_type = other RNA
gcaaacggttttacttcttc

SEQ ID NO: 559 - RNA, 20 nt, synthetic construct
  source 1..20: mol_type = other RNA
gcaacagggtcccgtccttg

SEQ ID NO: 560 - RNA, 20 nt, synthetic construct
  source 1..20: mol_type = other RNA
gcaaccagaaccatgaaaaa

SEQ ID NO: 561 - RNA, 20 nt, synthetic construct
  source 1..20: mol_type = other RNA
gcaagctggatctctcttat

SEQ ID NO: 562 - RNA, 20 nt, synthetic construct
  source 1..20: mol_type = other RNA
gcacagaggttggacaggga

SEQ ID NO: 563 - RNA, 20 nt, synthetic construct
  source 1..20: mol_type = other RNA
gcacagcagtctgccggcag

SEQ ID NO: 564 - RNA, 20 nt, synthetic construct
  source 1..20: mol_type = other RNA
gcacaggcctgtgtctcctt

SEQ ID NO: 565 - RNA, 20 nt, synthetic construct
  source 1..20: mol_type = other RNA
gcacagttcttccctgtcca

SEQ ID NO: 566 - RNA, 20 nt, synthetic construct
  source 1..20: mol_type = other RNA
gcactgctgtccacccagta

SEQ ID NO: 567 - RNA, 20 nt, synthetic construct
  source 1..20: mol_type = other RNA
gcagaactccgagaggtaag

SEQ ID NO: 568 - RNA, 20 nt, synthetic construct
  source 1..20: mol_type = other RNA
gcagactgctgtgccctgga

SEQ ID NO: 569 - RNA, 20 nt, synthetic construct
  source 1..20: mol_type = other RNA
gcagcagcccttcaattacc

SEQ ID NO: 570 - RNA, 20 nt, synthetic construct
  source 1..20: mol_type = other RNA
gcagcccttcaattacccat

SEQ ID NO: 571 - RNA, 20 nt, synthetic construct
  source 1..20: mol_type = other RNA
gcagcggtagtggaggcagt

SEQ ID NO: 572 - RNA, 20 nt, synthetic construct
  source 1..20: mol_type = other RNA
gcagctggtgagtcaggcca

SEQ ID NO: 573 - RNA, 20 nt, synthetic construct
  source 1..20: mol_type = other RNA
gcaggcttacctctcggagt

SEQ ID NO: 574 - RNA, 20 nt, synthetic construct
  source 1..20: mol_type = other RNA
gcagtcagcaacagggtccc

SEQ ID NO: 575 - RNA, 20 nt, synthetic construct
  source 1..20: mol_type = other RNA
gcagtctgccggcaggctta

SEQ ID NO: 576 - RNA, 20 nt, synthetic construct
  source 1..20: mol_type = other RNA
gcagtgccagctctccctgg

SEQ ID NO: 577 - RNA, 20 nt, synthetic construct
  source 1..20: mol_type = other RNA
gcatggcagctggtgagtca

SEQ ID NO: 578 - RNA, 20 nt, synthetic construct
  source 1..20: mol_type = other RNA
gccaccaccaccaccgccac

SEQ ID NO: 579 - RNA, 20 nt, synthetic construct
  source 1..20: mol_type = other RNA
gccaccactaccacctccgc

SEQ ID NO: 580 - RNA, 20 nt, synthetic construct
  source 1..20: mol_type = other RNA
gccaccactgcctccactac

SEQ ID NO: 581 - RNA, 20 nt, synthetic construct
  source 1..20: mol_type = other RNA
gccacccctgaagaagagag

SEQ ID NO: 582 - RNA, 20 nt, synthetic construct
  source 1..20: mol_type = other RNA
gccaccgccaccactaccac

SEQ ID NO: 583 - RNA, 20 nt, synthetic construct
  source 1..20: mol_type = other RNA
gccagccccagcaaacggtt

SEQ ID NO: 584 - RNA, 20 nt, synthetic construct
  source 1..20: mol_type = other RNA
gccagctccttctgtaggtg

SEQ ID NO: 585 - RNA, 20 nt, synthetic construct
  source 1..20: mol_type = other RNA
gccagctctccctgggcccc

SEQ ID NO: 586 - RNA, 20 nt, synthetic construct
  source 1..20: mol_type = other RNA
gccatgcagcagcccttcaa

SEQ ID NO: 587 - RNA, 20 nt, synthetic construct
  source 1..20: mol_type = other RNA
gcccaatcctaccaaggcaa

SEQ ID NO: 588 - RNA, 20 nt, synthetic construct
  source 1..20: mol_type = other RNA
gcccagaaggcctggtcaaa

SEQ ID NO: 589 - RNA, 20 nt, synthetic construct
  source 1..20: mol_type = other RNA
gcccagggagagctggcact

SEQ ID NO: 590 - RNA, 20 nt, synthetic construct
  source 1..20: mol_type = other RNA
gccccagcaaacggttttac

SEQ ID NO: 591 - RNA, 20 nt, synthetic construct
  source 1..20: mol_type = other RNA
gcccctccaggcacagttct

SEQ ID NO: 592 - RNA, 20 nt, synthetic construct
  source 1..20: mol_type = other RNA
gcccttcaattacccatatc

SEQ ID NO: 593 - RNA, 20 nt, synthetic construct
  source 1..20: mol_type = other RNA
gccgccaccactgcctccac

SEQ ID NO: 594 - RNA, 20 nt, synthetic construct
  source 1..20: mol_type = other RNA
gccgccgccaccactgcctc

SEQ ID NO: 595 - RNA, 20 nt, synthetic construct
  source 1..20: mol_type = other RNA
gccggcagactgctgtgccc

SEQ ID NO: 596 - RNA, 20 nt, synthetic construct
  source 1..20: mol_type = other RNA
gccggcaggcttacctctcg

SEQ ID NO: 597 - RNA, 20 nt, synthetic construct
  source 1..20: mol_type = other RNA
gcctccactaccgctgccac

SEQ ID NO: 598 - RNA, 20 nt, synthetic construct
  source 1..20: mol_type = other RNA
gcctccagggcacagcagtc

SEQ ID NO: 599 - RNA, 20 nt, synthetic construct
  source 1..20: mol_type = other RNA
gcctcctcttgagcagtcag

SEQ ID NO: 600 - RNA, 20 nt, synthetic construct
  source 1..20: mol_type = other RNA
gcctcctttgaccaggcctt

SEQ ID NO: 601 - RNA, 20 nt, synthetic construct
  source 1..20: mol_type = other RNA
gcctctacaggactgagaag

SEQ ID NO: 602 - RNA, 20 nt, synthetic construct
  source 1..20: mol_type = other RNA
gcctgactcaccagctgcca

SEQ ID NO: 603 - RNA, 20 nt, synthetic construct
  source 1..20: mol_type = other RNA
gcctgccggcagactgctgt

SEQ ID NO: 604 - RNA, 20 nt, synthetic construct
  source 1..20: mol_type = other RNA
gcctggaggggcccagggag

SEQ ID NO: 605 - RNA, 20 nt, synthetic construct
  source 1..20: mol_type = other RNA
gcctggggatgtttcagctc

SEQ ID NO: 606 - RNA, 20 nt, synthetic construct
  source 1..20: mol_type = other RNA
gcctggtcaaaggaggccac

SEQ ID NO: 607 - RNA, 20 nt, synthetic construct
  source 1..20: mol_type = other RNA
gcctggtgcctccagggcac

SEQ ID NO: 608 - RNA, 20 nt, synthetic construct
  source 1..20: mol_type = other RNA
gcctgtgctgtggttccctc

SEQ ID NO: 609 - RNA, 20 nt, synthetic construct
  source 1..20: mol_type = other RNA
gcctgtgtctccttgtgatg

SEQ ID NO: 610 - RNA, 20 nt, synthetic construct
  source 1..20: mol_type = other RNA
gccttctgggcacagaggtt

SEQ ID NO: 611 - RNA, 20 nt, synthetic construct
  source 1..20: mol_type = other RNA
gccttggtaggattgggcct

SEQ ID NO: 612 - RNA, 20 nt, synthetic construct
  source 1..20: mol_type = other RNA
gcggaggtggtagtggtggc

SEQ ID NO: 613 - RNA, 20 nt, synthetic construct
  source 1..20: mol_type = other RNA
gcggcggaggtggtagtggt

SEQ ID NO: 614 - RNA, 20 nt, synthetic construct
  source 1..20: mol_type = other RNA
gcggcggcggaggtggtagt

SEQ ID NO: 615 - RNA, 20 nt, synthetic construct
  source 1..20: mol_type = other RNA
gcggtagtggaggcagtggt

SEQ ID NO: 616 - RNA, 20 nt, synthetic construct
  source 1..20: mol_type = other RNA
gcggtggcggtggtggtggt

SEQ ID NO: 617 - RNA, 20 nt, synthetic construct
  source 1..20: mol_type = other RNA
gcggtggtggtggtggcctc

SEQ ID NO: 618 - RNA, 20 nt, synthetic construct
  source 1..20: mol_type = other RNA
gctatggaaactctataaga

SEQ ID NO: 619 - RNA, 20 nt, synthetic construct
  source 1..20: mol_type = other RNA
gctcaagaggaggcaagctg

SEQ ID NO: 620 - RNA, 20 nt, synthetic construct
  source 1..20: mol_type = other RNA
gctccttctgtaggtggaag

SEQ ID NO: 621 - RNA, 20 nt, synthetic construct
  source 1..20: mol_type = other RNA
gctctccctgggcccctcca

SEQ ID NO: 622 - RNA, 20 nt, synthetic construct
  source 1..20: mol_type = other RNA
gctcttccacctacagaagg

SEQ ID NO: 623 - RNA, 20 nt, synthetic construct
  source 1..20: mol_type = other RNA
gctgaaacatccccaggccc

SEQ ID NO: 624 - RNA, 20 nt, synthetic construct
  source 1..20: mol_type = other RNA
gctgactgctcaagaggagg

SEQ ID NO: 625 - RNA, 20 nt, synthetic construct
  source 1..20: mol_type = other RNA
gctgaggtgtcaaggacggg

SEQ ID NO: 626 - RNA, 20 nt, synthetic construct
  source 1..20: mol_type = other RNA
gctgcatggcagctggtgag

SEQ ID NO: 627 - RNA, 20 nt, synthetic construct
  source 1..20: mol_type = other RNA
gctgccacccctgaagaaga

SEQ ID NO: 628 - RNA, 20 nt, synthetic construct
  source 1..20: mol_type = other RNA
gctgccatgcagcagccctt

SEQ ID NO: 629 - RNA, 20 nt, synthetic construct
  source 1..20: mol_type = other RNA
gctgctgcatggcagctggt

SEQ ID NO: 630 - RNA, 20 nt, synthetic construct
  source 1..20: mol_type = other RNA
gctggatctctcttatagag

SEQ ID NO: 631 - RNA, 20 nt, synthetic construct
  source 1..20: mol_type = other RNA
gctggcactgctgtccaccc

SEQ ID NO: 632 - RNA, 20 nt, synthetic construct
  source 1..20: mol_type = other RNA
gctggcagaactccgagagg

SEQ ID NO: 633 - RNA, 20 nt, synthetic construct
  source 1..20: mol_type = other RNA
gctggcctgactcaccagct

SEQ ID NO: 634 - RNA, 20 nt, synthetic construct
  source 1..20: mol_type = other RNA
gctggggctggcctgactca

SEQ ID NO: 635 - RNA, 20 nt, synthetic construct
  source 1..20: mol_type = other RNA
gctggtgagtcaggccagcc

SEQ ID NO: 636 - RNA, 20 nt, synthetic construct
  source 1..20: mol_type = other RNA
gctgtccacccagtagatct

SEQ ID NO: 637 - RNA, 20 nt, synthetic construct
  source 1..20: mol_type = other RNA
gctgtggttccctctcttct

SEQ ID NO: 638 - RNA, 20 nt, synthetic construct
  source 1..20: mol_type = other RNA
gcttacctctcggagttctg

SEQ ID NO: 639 - RNA, 20 nt, synthetic construct
  source 1..20: mol_type = other RNA
gcttgcctcctcttgagcag

SEQ ID NO: 640 - RNA, 20 nt, synthetic construct
  source 1..20: mol_type = other RNA
ggaaactctataagagagat

SEQ ID NO: 641 - RNA, 20 nt, synthetic construct
  source 1..20: mol_type = other RNA
ggaaccacagcacaggcctg

SEQ ID NO: 642 - RNA, 20 nt, synthetic construct
  source 1..20: mol_type = other RNA
ggaagaactgtgcctggagg

SEQ ID NO: 643 - RNA, 20 nt, synthetic construct
  source 1..20: mol_type = other RNA
ggaagagctgaaacatcccc

SEQ ID NO: 644 - RNA, 20 nt, synthetic construct
  source 1..20: mol_type = other RNA
ggacagcagtgccagctctc

SEQ ID NO: 645 - RNA, 20 nt, synthetic construct
  source 1..20: mol_type = other RNA
ggacagggaagaactgtgcc

SEQ ID NO: 646 - RNA, 20 nt, synthetic construct
  source 1..20: mol_type = other RNA
ggaccctgttgctgactgct

SEQ ID NO: 647 - RNA, 20 nt, synthetic construct
  source 1..20: mol_type = other RNA
ggacgggaccctgttgctga

SEQ ID NO: 648 - RNA, 20 nt, synthetic construct
  source 1..20: mol_type = other RNA
ggactgagaagaagtaaaac

SEQ ID NO: 649 - RNA, 20 nt, synthetic construct
  source 1..20: mol_type = other RNA
ggagacacaggcctgtgctg

SEQ ID NO: 650 - RNA, 20 nt, synthetic construct
  source 1..20: mol_type = other RNA
ggagagctggcactgctgtc

SEQ ID NO: 651 - RNA, 20 nt, synthetic construct
  source 1..20: mol_type = other RNA
ggagctggcagaactccgag

SEQ ID NO: 652 - RNA, 20 nt, synthetic construct
  source 1..20: mol_type = other RNA
ggaggcaagctggatctctc

SEQ ID NO: 653 - RNA, 20 nt, synthetic construct
  source 1..20: mol_type = other RNA
ggaggcagtggtggcggcgg

SEQ ID NO: 654 - RNA, 20 nt, synthetic construct
  source 1..20: mol_type = other RNA
ggaggccaccaccaccaccg

SEQ ID NO: 655 - RNA, 20 nt, synthetic construct
  source 1..20: mol_type = other RNA
ggaggggcccagggagagct

SEQ ID NO: 656 - RNA, 20 nt, synthetic construct
  source 1..20: mol_type = other RNA
ggaggtggtagtggtggcgg

SEQ ID NO: 657 - RNA, 20 nt, synthetic construct
  source 1..20: mol_type = other RNA
ggagttctgccagctccttc

SEQ ID NO: 658 - RNA, 20 nt, synthetic construct
  source 1..20: mol_type = other RNA
ggatatgggtaattgaaggg

SEQ ID NO: 659 - RNA, 20 nt, synthetic construct
  source 1..20: mol_type = other RNA
ggatctctcttatagagttt

SEQ ID NO: 660 - RNA, 20 nt, synthetic construct
  source 1..20: mol_type = other RNA
ggatgtttcagctcttccac

SEQ ID NO: 661 - RNA, 20 nt, synthetic construct
  source 1..20: mol_type = other RNA
ggattgggcctggggatgtt

SEQ ID NO: 662 - RNA, 20 nt, synthetic construct
  source 1..20: mol_type = other RNA
ggcaaccagaaccatgaaaa

SEQ ID NO: 663 - RNA, 20 nt, synthetic construct
  source 1..20: mol_type = other RNA
ggcaagctggatctctctta

SEQ ID NO: 664 - RNA, 20 nt, synthetic construct
  source 1..20: mol_type = other RNA
ggcacagaggttggacaggg

SEQ ID NO: 665 - RNA, 20 nt, synthetic construct
  source 1..20: mol_type = other RNA
ggcacagcagtctgccggca

SEQ ID NO: 666 - RNA, 20 nt, synthetic construct
  source 1..20: mol_type = other RNA
ggcacagttcttccctgtcc

SEQ ID NO: 667 - RNA, 20 nt, synthetic construct
  source 1..20: mol_type = other RNA
ggcactgctgtccacccagt

SEQ ID NO: 668 - RNA, 20 nt, synthetic construct
  source 1..20: mol_type = other RNA
ggcagaactccgagaggtaa

SEQ ID NO: 669 - RNA, 20 nt, synthetic construct
  source 1..20: mol_type = other RNA
ggcagactgctgtgccctgg

SEQ ID NO: 670 - RNA, 20 nt, synthetic construct
  source 1..20: mol_type = other RNA
ggcagcggtagtggaggcag

SEQ ID NO: 671 - RNA, 20 nt, synthetic construct
  source 1..20: mol_type = other RNA
ggcagctggtgagtcaggcc

SEQ ID NO: 672 - RNA, 20 nt, synthetic construct
  source 1..20: mol_type = other RNA
ggcaggcttacctctcggag

SEQ ID NO: 673 - RNA, 20 nt, synthetic construct
  source 1..20: mol_type = other RNA
ggccaccaccaccaccgcca

SEQ ID NO: 674 - RNA, 20 nt, synthetic construct
  source 1..20: mol_type = other RNA
ggccagccccagcaaacggt

SEQ ID NO: 675 - RNA, 20 nt, synthetic construct
  source 1..20: mol_type = other RNA
ggcccaatcctaccaaggca

SEQ ID NO: 676 - RNA, 20 nt, synthetic construct
  source 1..20: mol_type = other RNA
ggcccagggagagctggcac

SEQ ID NO: 677 - RNA, 20 nt, synthetic construct
  source 1..20: mol_type = other RNA
ggcccctccaggcacagttc

SEQ ID NO: 678 - RNA, 20 nt, synthetic construct
  source 1..20: mol_type = other RNA
ggcctcctttgaccaggcct

SEQ ID NO: 679 - RNA, 20 nt, synthetic construct
  source 1..20: mol_type = other RNA
ggcctgactcaccagctgcc

SEQ ID NO: 680 - RNA, 20 nt, synthetic construct
  source 1..20: mol_type = other RNA
ggcctggggatgtttcagct

SEQ ID NO: 681 - RNA, 20 nt, synthetic construct
  source 1..20: mol_type = other RNA
ggcctggtcaaaggaggcca

SEQ ID NO: 682 - RNA, 20 nt, synthetic construct
  source 1..20: mol_type = other RNA
ggcctgtgctgtggttccct

SEQ ID NO: 683 - RNA, 20 nt, synthetic construct
  source 1..20: mol_type = other RNA
ggcctgtgtctccttgtgat

SEQ ID NO: 684 - RNA, 20 nt, synthetic construct
  source 1..20: mol_type = other RNA
ggccttctgggcacagaggt

SEQ ID NO: 685 - RNA, 20 nt, synthetic construct
  source 1..20: mol_type = other RNA
ggcggaggtggtagtggtgg

SEQ ID NO: 686 - RNA, 20 nt, synthetic construct
  source 1..20: mol_type = other RNA
ggcggcggaggtggtagtgg

SEQ ID NO: 687 - RNA, 20 nt, synthetic construct
  source 1..20: mol_type = other RNA
ggcggcggcggaggtggtag

SEQ ID NO: 688 - RNA, 20 nt, synthetic construct
  source 1..20: mol_type = other RNA
ggcggtggcggtggtggtgg

SEQ ID NO: 689 - RNA, 20 nt, synthetic construct
  source 1..20: mol_type = other RNA
ggcggtggtggtggtggcct

SEQ ID NO: 690 - RNA, 20 nt, synthetic construct
  source 1..20: mol_type = other RNA
ggctgaggtgtcaaggacgg

SEQ ID NO: 691 - RNA, 20 nt, synthetic construct
  source 1..20: mol_type = other RNA
ggctgctgcatggcagctgg

SEQ ID NO: 692 - RNA, 20 nt, synthetic construct
  source 1..20: mol_type = other RNA
ggctggcctgactcaccagc

SEQ ID NO: 693 - RNA, 20 nt, synthetic construct
  source 1..20: mol_type = other RNA
ggcttacctctcggagttct

SEQ ID NO: 694 - RNA, 20 nt, synthetic construct
  source 1..20: mol_type = other RNA
gggaaccacagcacaggcct

SEQ ID NO: 695 - RNA, 20 nt, synthetic construct
  source 1..20: mol_type = other RNA
gggaagaactgtgcctggag

SEQ ID NO: 696 - RNA, 20 nt, synthetic construct
  source 1..20: mol_type = other RNA
gggaccctgttgctgactgc

SEQ ID NO: 697 - RNA, 20 nt, synthetic construct
  source 1..20: mol_type = other RNA
gggagagctggcactgctgt

SEQ ID NO: 698 - RNA, 20 nt, synthetic construct
  source 1..20: mol_type = other RNA
gggatatgggtaattgaagg

SEQ ID NO: 699 - RNA, 20 nt, synthetic construct
  source 1..20: mol_type = other RNA
gggatgtttcagctcttcca

SEQ ID NO: 700 - RNA, 20 nt, synthetic construct
  source 1..20: mol_type = other RNA
gggcacagaggttggacagg

SEQ ID NO: 701 - RNA, 20 nt, synthetic construct
  source 1..20: mol_type = other RNA
gggcacagcagtctgccggc

SEQ ID NO: 702 - RNA, 20 nt, synthetic construct
  source 1..20: mol_type = other RNA
gggcccagggagagctggca

SEQ ID NO: 703 - RNA, 20 nt, synthetic construct
  source 1..20: mol_type = other RNA
gggcccctccaggcacagtt

SEQ ID NO: 704 - RNA, 20 nt, synthetic construct
  source 1..20: mol_type = other RNA
gggcctggggatgtttcagc

SEQ ID NO: 705 - RNA, 20 nt, synthetic construct
  source 1..20: mol_type = other RNA
gggctgctgcatggcagctg

SEQ ID NO: 706 - RNA, 20 nt, synthetic construct
  source 1..20: mol_type = other RNA
gggctggcctgactcaccag

SEQ ID NO: 707 - RNA, 20 nt, synthetic construct
  source 1..20: mol_type = other RNA
ggggatatgggtaattgaag

SEQ ID NO: 708 - RNA, 20 nt, synthetic construct
  source 1..20: mol_type = other RNA
ggggatgtttcagctcttcc

SEQ ID NO: 709 - RNA, 20 nt, synthetic construct
  source 1..20: mol_type = other RNA
ggggcccagggagagctggc

SEQ ID NO: 710 - RNA, 20 nt, synthetic construct
  source 1..20: mol_type = other RNA
ggggctggcctgactcacca

SEQ ID NO: 711 - RNA, 20 nt, synthetic construct
  source 1..20: mol_type = other RNA
ggggtggcagcggtagtgga

SEQ ID NO: 712 - RNA, 20 nt, synthetic construct
  source 1..20: mol_type = other RNA
gggtaattgaagggctgctg

SEQ ID NO: 713 - RNA, 20 nt, synthetic construct
  source 1..20: mol_type = other RNA
gggtcccgtccttgacacct

SEQ ID NO: 714 - RNA, 20 nt, synthetic construct
  source 1..20: mol_type = other RNA
gggtggacagcagtgccagc

SEQ ID NO: 715 - RNA, 20 nt, synthetic construct
  source 1..20: mol_type = other RNA
gggtggcagcggtagtggag

SEQ ID NO: 716 - RNA, 20 nt, synthetic construct
  source 1..20: mol_type = other RNA
ggtaagcctgccggcagact

SEQ ID NO: 717 - RNA, 20 nt, synthetic construct
  source 1..20: mol_type = other RNA
ggtaattgaagggctgctgc

SEQ ID NO: 718 - RNA, 20 nt, synthetic construct
  source 1..20: mol_type = other RNA
ggtaggattgggcctgggga

SEQ ID NO: 719 - RNA, 20 nt, synthetic construct
  source 1..20: mol_type = other RNA
ggtagtggaggcagtggtgg

SEQ ID NO: 720 - RNA, 20 nt, synthetic construct
  source 1..20: mol_type = other RNA
ggtagtggtggcggtggcgg

SEQ ID NO: 721 - RNA, 20 nt, synthetic construct
  source 1..20: mol_type = other RNA
ggtcaaaggaggccaccacc

SEQ ID NO: 722 - RNA, 20 nt, synthetic construct
  source 1..20: mol_type = other RNA
ggtcccgtccttgacacctc

SEQ ID NO: 723 - RNA, 20 nt, synthetic construct
  source 1..20: mol_type = other RNA
ggtgagtcaggccagcccca

SEQ ID NO: 724 - RNA, 20 nt, synthetic construct
  source 1..20: mol_type = other RNA
ggtgcctccagggcacagca

SEQ ID NO: 725 - RNA, 20 nt, synthetic construct
  source 1..20: mol_type = other RNA
ggtggaagagctgaaacatc

SEQ ID NO: 726 - RNA, 20 nt, synthetic construct
  source 1..20: mol_type = other RNA
ggtggacagcagtgccagct

SEQ ID NO: 727 - RNA, 20 nt, synthetic construct
  source 1..20: mol_type = other RNA
ggtggcagcggtagtggagg

SEQ ID NO: 728 - RNA, 20 nt, synthetic construct
  source 1..20: mol_type = other RNA
ggtggcctcctttgaccagg

SEQ ID NO: 729 - RNA, 20 nt, synthetic construct
  source 1..20: mol_type = other RNA
ggtggcggtggcggtggtgg

SEQ ID NO: 730 - RNA, 20 nt, synthetic construct
  source 1..20: mol_type = other RNA
ggtggcggtggtggtggtgg

SEQ ID NO: 731 - RNA, 20 nt, synthetic construct
  source 1..20: mol_type = other RNA
ggtggtagtggtggcggtgg

SEQ ID NO: 732 - RNA, 20 nt, synthetic construct
  source 1..20: mol_type = other RNA
ggtggtggcctcctttgacc

SEQ ID NO: 733 - RNA, 20 nt, synthetic construct
  source 1..20: mol_type = other RNA
ggtggtggtggcctcctttg

SEQ ID NO: 734 - RNA, 20 nt, synthetic construct
  source 1..20: mol_type = other RNA
ggtggtggtggtggcctcct

SEQ ID NO: 735 - RNA, 20 nt, synthetic construct
  source 1..20: mol_type = other RNA
ggtgtcaaggacgggaccct

SEQ ID NO: 736 - RNA, 20 nt, synthetic construct
  source 1..20: mol_type = other RNA
ggttccctctcttcttcagg

SEQ ID NO: 737 - RNA, 20 nt, synthetic construct
  source 1..20: mol_type = other RNA
ggttctggttgccttggtag

SEQ ID NO: 738 - RNA, 20 nt, synthetic construct
  source 1..20: mol_type = other RNA
ggttgccttggtaggattgg

SEQ ID NO: 739 - RNA, 20 nt, synthetic construct
  source 1..20: mol_type = other RNA
ggttggacagggaagaactg

SEQ ID NO: 740 - RNA, 20 nt, synthetic construct
  source 1..20: mol_type = other RNA
ggttttacttcttctcagtc

SEQ ID NO: 741 - RNA, 20 nt, synthetic construct
  source 1..20: mol_type = other RNA
gtaaaaccgtttgctggggc

SEQ ID NO: 742 - RNA, 20 nt, synthetic construct
  source 1..20: mol_type = other RNA
gtaagcctgccggcagactg

SEQ ID NO: 743 - RNA, 20 nt, synthetic construct
  source 1..20: mol_type = other RNA
gtaattgaagggctgctgca

SEQ ID NO: 744 - RNA, 20 nt, synthetic construct
  source 1..20: mol_type = other RNA
gtagaggctgaggtgtcaag

SEQ ID NO: 745 - RNA, 20 nt, synthetic construct
  source 1..20: mol_type = other RNA
gtagatctggggatatgggt

SEQ ID NO: 746 - RNA, 20 nt, synthetic construct
  source 1..20: mol_type = other RNA
gtaggattgggcctggggat

SEQ ID NO: 747 - RNA, 20 nt, synthetic construct
  source 1..20: mol_type = other RNA
gtaggtggaagagctgaaac

SEQ ID NO: 748 - RNA, 20 nt, synthetic construct
  source 1..20: mol_type = other RNA
gtagtggaggcagtggtggc

SEQ ID NO: 749 - RNA, 20 nt, synthetic construct
  source 1..20: mol_type = other RNA
gtagtggtggcggtggcggt

SEQ ID NO: 750 - RNA, 20 nt, synthetic construct
  source 1..20: mol_type = other RNA
gtcaaaggaggccaccacca

SEQ ID NO: 751 - RNA, 20 nt, synthetic construct
  source 1..20: mol_type = other RNA
gtcaaggacgggaccctgtt

SEQ ID NO: 752 - RNA, 20 nt, synthetic construct
  source 1..20: mol_type = other RNA
gtcagcaacagggtcccgtc

SEQ ID NO: 753 - RNA, 20 nt, synthetic construct
  source 1..20: mol_type = other RNA
gtcaggccagccccagcaaa

SEQ ID NO: 754 - RNA, 20 nt, synthetic construct
  source 1..20: mol_type = other RNA
gtccaacctctgtgcccaga

SEQ ID NO: 755 - RNA, 20 nt, synthetic construct
  source 1..20: mol_type = other RNA
gtccacccagtagatctggg

SEQ ID NO: 756 - RNA, 20 nt, synthetic construct
  source 1..20: mol_type = other RNA
gtcccgtccttgacacctca

SEQ ID NO: 757 - RNA, 20 nt, synthetic construct
  source 1..20: mol_type = other RNA
gtcctgtagaggctgaggtg

SEQ ID NO: 758 - RNA, 20 nt, synthetic construct
  source 1..20: mol_type = other RNA
gtccttgacacctcagcctc

SEQ ID NO: 759 - RNA, 20 nt, synthetic construct
  source 1..20: mol_type = other RNA
gtctccttgtgatgtttttc

SEQ ID NO: 760 - RNA, 20 nt, synthetic construct
  source 1..20: mol_type = other RNA
gtctgccggcaggcttacct

SEQ ID NO: 761 - RNA, 20 nt, synthetic construct
  source 1..20: mol_type = other RNA
gtgagtcaggccagccccag

SEQ ID NO: 762 - RNA, 20 nt, synthetic construct
  source 1..20: mol_type = other RNA
gtgatgtttttcatggttct

SEQ ID NO: 763 - RNA, 20 nt, synthetic construct
  source 1..20: mol_type = other RNA
gtgccagctctccctgggcc

SEQ ID NO: 764 - RNA, 20 nt, synthetic construct
  source 1..20: mol_type = other RNA
gtgcccagaaggcctggtca

SEQ ID NO: 765 - RNA, 20 nt, synthetic construct
  source 1..20: mol_type = other RNA
gtgcctccagggcacagcag

SEQ ID NO: 766 - RNA, 20 nt, synthetic construct
  source 1..20: mol_type = other RNA
gtgcctggaggggcccaggg

SEQ ID NO: 767 - RNA, 20 nt, synthetic construct
  source 1..20: mol_type = other RNA
gtgctgtggttccctctctt

SEQ ID NO: 768 - RNA, 20 nt, synthetic construct
  source 1..20: mol_type = other RNA
gtggaagagctgaaacatcc

SEQ ID NO: 769 - RNA, 20 nt, synthetic construct
  source 1..20: mol_type = other RNA
gtggacagcagtgccagctc

SEQ ID NO: 770 - RNA, 20 nt, synthetic construct
  source 1..20: mol_type = other RNA
gtggaggcagtggtggcggc

SEQ ID NO: 771 - RNA, 20 nt, synthetic construct
  source 1..20: mol_type = other RNA
gtggcagcggtagtggaggc

SEQ ID NO: 772 - RNA, 20 nt, synthetic construct
  source 1..20: mol_type = other RNA
gtggcctcctttgaccaggc

SEQ ID NO: 773 - RNA, 20 nt, synthetic construct
  source 1..20: mol_type = other RNA
gtggcggtggcggtggtggt

SEQ ID NO: 774 - RNA, 20 nt, synthetic construct
  source 1..20: mol_type = other RNA
gtggcggtggtggtggtggc

SEQ ID NO: 775 - RNA, 20 nt, synthetic construct
  source 1..20: mol_type = other RNA
gtggtagtggtggcggtggc

SEQ ID NO: 776 - RNA, 20 nt, synthetic construct
  source 1..20: mol_type = other RNA
gtggtggcctcctttgacca

SEQ ID NO: 777 - RNA, 20 nt, synthetic construct
  source 1..20: mol_type = other RNA
gtggtggtggcctcctttga

SEQ ID NO: 778 - RNA, 20 nt, synthetic construct
  source 1..20: mol_type = other RNA
gtggtggtggtggcctcctt

SEQ ID NO: 779 - RNA, 20 nt, synthetic construct
  source 1..20: mol_type = other RNA
gtggttccctctcttcttca

SEQ ID NO: 780 - RNA, 20 nt, synthetic construct
  source 1..20: mol_type = other RNA
gtgtcaaggacgggaccctg

SEQ ID NO: 781 - RNA, 20 nt, synthetic construct
  source 1..20: mol_type = other RNA
gtgtctccttgtgatgtttt

SEQ ID NO: 782 - RNA, 20 nt, synthetic construct
  source 1..20: mol_type = other RNA
gttccctctcttcttcaggg

SEQ ID NO: 783 - RNA, 20 nt, synthetic construct
  source 1..20: mol_type = other RNA
gttctgccagctccttctgt

SEQ ID NO: 784 - RNA, 20 nt, synthetic construct
  source 1..20: mol_type = other RNA
gttctggttgccttggtagg

SEQ ID NO: 785 - RNA, 20 nt, synthetic construct
  source 1..20: mol_type = other RNA
gttcttccctgtccaacctc

SEQ ID NO: 786 - RNA, 20 nt, synthetic construct
  source 1..20: mol_type = other RNA
gttgccttggtaggattggg

SEQ ID NO: 787 - RNA, 20 nt, synthetic construct
  source 1..20: mol_type = other RNA
gttgctgactgctcaagagg

SEQ ID NO: 788 - RNA, 20 nt, synthetic construct
  source 1..20: mol_type = other RNA
gttggacagggaagaactgt

SEQ ID NO: 789 - RNA, 20 nt, synthetic construct
  source 1..20: mol_type = other RNA
gtttcagctcttccacctac

SEQ ID NO: 790 - RNA, 20 nt, synthetic construct
  source 1..20: mol_type = other RNA
gtttgctggggctggcctga

SEQ ID NO: 791 - RNA, 20 nt, synthetic construct
  source 1..20: mol_type = other RNA
gttttacttcttctcagtcc

SEQ ID NO: 792 - RNA, 20 nt, synthetic construct
  source 1..20: mol_type = other RNA
gtttttcatggttctggttg

SEQ ID NO: 793 - RNA, 20 nt, synthetic construct
  source 1..20: mol_type = other RNA
taaaaccgtttgctggggct

SEQ ID NO: 794 - RNA, 20 nt, synthetic construct
  source 1..20: mol_type = other RNA
taagagagatccagcttgcc

SEQ ID NO: 795 - RNA, 20 nt, synthetic construct
  source 1..20: mol_type = other RNA
taagcctgccggcagactgc

SEQ ID NO: 796 - RNA, 20 nt, synthetic construct
  source 1..20: mol_type = other RNA
taattgaagggctgctgcat

SEQ ID NO: 797 - RNA, 20 nt, synthetic construct
  source 1..20: mol_type = other RNA
tacagaaggagctggcagaa

SEQ ID NO: 798 - RNA, 20 nt, synthetic construct
  source 1..20: mol_type = other RNA
tacaggactgagaagaagta

SEQ ID NO: 799 - RNA, 20 nt, synthetic construct
  source 1..20: mol_type = other RNA
taccaaggcaaccagaacca

SEQ ID NO: 800 - RNA, 20 nt, synthetic construct
  source 1..20: mol_type = other RNA
taccacctccgccgccgccg

SEQ ID NO: 801 - RNA, 20 nt, synthetic construct
  source 1..20: mol_type = other RNA
tacccatatccccagatcta

SEQ ID NO: 802 - RNA, 20 nt, synthetic construct
  source 1..20: mol_type = other RNA
taccgctgccacccctgaag

SEQ ID NO: 803 - RNA, 20 nt, synthetic construct
  source 1..20: mol_type = other RNA
tacctctcggagttctgcca

SEQ ID NO: 804 - RNA, 20 nt, synthetic construct
  source 1..20: mol_type = other RNA
tactgggtggacagcagtgc

SEQ ID NO: 805 - RNA, 20 nt, synthetic construct
  source 1..20: mol_type = other RNA
tacttcttctcagtcctgta

SEQ ID NO: 806 - RNA, 20 nt, synthetic construct
  source 1..20: mol_type = other RNA
tagaggctgaggtgtcaagg

SEQ ID NO: 807 - RNA, 20 nt, synthetic construct
  source 1..20: mol_type = other RNA
tagatctggggatatgggta

SEQ ID NO: 808 - RNA, 20 nt, synthetic construct
  source 1..20: mol_type = other RNA
tagctatggaaactctataa

SEQ ID NO: 809 - RNA, 20 nt, synthetic construct
  source 1..20: mol_type = other RNA
taggattgggcctggggatg

SEQ ID NO: 810 - RNA, 20 nt, synthetic construct
  source 1..20: mol_type = other RNA
taggtggaagagctgaaaca

SEQ ID NO: 811 - RNA, 20 nt, synthetic construct
  source 1..20: mol_type = other RNA
tagtggaggcagtggtggcg

SEQ ID NO: 812 - RNA, 20 nt, synthetic construct
  source 1..20: mol_type = other RNA
tagtggtggcggtggcggtg

SEQ ID NO: 813 - RNA, 20 nt, synthetic construct
  source 1..20: mol_type = other RNA
tataagagagatccagcttg

SEQ ID NO: 814 - RNA, 20 nt, synthetic construct
  source 1..20: mol_type = other RNA
tatccccagatctactgggt

SEQ ID NO: 815 - RNA, 20 nt, synthetic construct
  source 1..20: mol_type = other RNA
tatgcctggtgcctccaggg

SEQ ID NO: 816 - RNA, 20 nt, synthetic construct
  source 1..20: mol_type = other RNA
tatggaaactctataagaga

SEQ ID NO: 817 - RNA, 20 nt, synthetic construct
  source 1..20: mol_type = other RNA
tatgggtaattgaagggctg

SEQ ID NO: 818 - RNA, 20 nt, synthetic construct
  source 1..20: mol_type = other RNA
tcaaaggaggccaccaccac

SEQ ID NO: 819 - RNA, 20 nt, synthetic construct
  source 1..20: mol_type = other RNA
tcaagaggaggcaagctgga

SEQ ID NO: 820 - RNA, 20 nt, synthetic construct
  source 1..20: mol_type = other RNA
tcaaggacgggaccctgttg

SEQ ID NO: 821 - RNA, 20 nt, synthetic construct
  source 1..20: mol_type = other RNA
tcaattacccatatccccag

SEQ ID NO: 822 - RNA, 20 nt, synthetic construct
  source 1..20: mol_type = other RNA
tcacaaggagacacaggcct

SEQ ID NO: 823 - RNA, 20 nt, synthetic construct
  source 1..20: mol_type = other RNA
tcaccagctgccatgcagca

SEQ ID NO: 824 - RNA, 20 nt, synthetic construct
  source 1..20: mol_type = other RNA
tcagcaacagggtcccgtcc

SEQ ID NO: 825 - RNA, 20 nt, synthetic construct
  source 1..20: mol_type = other RNA
tcagcctctacaggactgag

SEQ ID NO: 826 - RNA, 20 nt, synthetic construct
  source 1..20: mol_type = other RNA
tcagctcttccacctacaga

SEQ ID NO: 827 - RNA, 20 nt, synthetic construct
  source 1..20: mol_type = other RNA
tcaggccagccccagcaaac

SEQ ID NO: 828 - RNA, 20 nt, synthetic construct
  source 1..20: mol_type = other RNA
tcaggggtggcagcggtagt

SEQ ID NO: 829 - RNA, 20 nt, synthetic construct
  source 1..20: mol_type = other RNA
tcagtcctgtagaggctgag

SEQ ID NO: 830 - RNA, 20 nt, synthetic construct
  source 1..20: mol_type = other RNA
tcatggttctggttgccttg

SEQ ID NO: 831 - RNA, 20 nt, synthetic construct
  source 1..20: mol_type = other RNA
tccaacctctgtgcccagaa

SEQ ID NO: 832 - RNA, 20 nt, synthetic construct
  source 1..20: mol_type = other RNA
tccacccagtagatctgggg

SEQ ID NO: 833 - RNA, 20 nt, synthetic construct
  source 1..20: mol_type = other RNA
tccacctacagaaggagctg

SEQ ID NO: 834 - RNA, 20 nt, synthetic construct
  source 1..20: mol_type = other RNA
tccactaccgctgccacccc

SEQ ID NO: 835 - RNA, 20 nt, synthetic construct
  source 1..20: mol_type = other RNA
tccagcttgcctcctcttga

SEQ ID NO: 836 - RNA, 20 nt, synthetic construct
  source 1..20: mol_type = other RNA
tccaggcacagttcttccct

SEQ ID NO: 837 - RNA, 20 nt, synthetic construct
  source 1..20: mol_type = other RNA
tccagggcacagcagtctgc

SEQ ID NO: 838 - RNA, 20 nt, synthetic construct
  source 1..20: mol_type = other RNA
tccccagatctactgggtgg

SEQ ID NO: 839 - RNA, 20 nt, synthetic construct
  source 1..20: mol_type = other RNA
tccccaggcccaatcctacc

SEQ ID NO: 840 - RNA, 20 nt, synthetic construct
  source 1..20: mol_type = other RNA
tcccgtccttgacacctcag

SEQ ID NO: 841 - RNA, 20 nt, synthetic construct
  source 1..20: mol_type = other RNA
tccctctcttcttcaggggt

SEQ ID NO: 842 - RNA, 20 nt, synthetic construct
  source 1..20: mol_type = other RNA
tccctgggcccctccaggca

SEQ ID NO: 843 - RNA, 20 nt, synthetic construct
  source 1..20: mol_type = other RNA
tccctgtccaacctctgtgc

SEQ ID NO: 844 - RNA, 20 nt, synthetic construct
  source 1..20: mol_type = other RNA
tccgagaggtaagcctgccg

SEQ ID NO: 845 - RNA, 20 nt, synthetic construct
  source 1..20: mol_type = other RNA
tcctaccaaggcaaccagaa

SEQ ID NO: 846 - RNA, 20 nt, synthetic construct
  source 1..20: mol_type = other RNA
tcctcttgagcagtcagcaa

SEQ ID NO: 847 - RNA, 20 nt, synthetic construct
  source 1..20: mol_type = other RNA
tcctgtagaggctgaggtgt

SEQ ID NO: 848 - RNA, 20 nt, synthetic construct
  source 1..20: mol_type = other RNA
tccttctgtaggtggaagag

SEQ ID NO: 849 - RNA, 20 nt, synthetic construct
  source 1..20: mol_type = other RNA
tccttgacacctcagcctct

SEQ ID NO: 850 - RNA, 20 nt, synthetic construct
  source 1..20: mol_type = other RNA
tccttgtgatgtttttcatg

SEQ ID NO: 851 - RNA, 20 nt, synthetic construct
  source 1..20: mol_type = other RNA
tcctttgaccaggccttctg

SEQ ID NO: 852 - RNA, 20 nt, synthetic construct
  source 1..20: mol_type = other RNA
tcggagttctgccagctcct

SEQ ID NO: 853 - RNA, 20 nt, synthetic construct
  source 1..20: mol_type = other RNA
tctacaggactgagaagaag

SEQ ID NO: 854 - RNA, 20 nt, synthetic construct
  source 1..20: mol_type = other RNA
tctactgggtggacagcagt

SEQ ID NO: 855 - RNA, 20 nt, synthetic construct
  source 1..20: mol_type = other RNA
tctataagagagatccagct

SEQ ID NO: 856 - RNA, 20 nt, synthetic construct
  source 1..20: mol_type = other RNA
tctcagtcctgtagaggctg

SEQ ID NO: 857 - RNA, 20 nt, synthetic construct
  source 1..20: mol_type = other RNA
tctccctgggcccctccagg

SEQ ID NO: 858 - RNA, 20 nt, synthetic construct
  source 1..20: mol_type = other RNA
tctccttgtgatgtttttca

SEQ ID NO: 859 - RNA, 20 nt, synthetic construct
  source 1..20: mol_type = other RNA
tctcggagttctgccagctc

SEQ ID NO: 860 - RNA, 20 nt, synthetic construct
  source 1..20: mol_type = other RNA
tctcttcttcaggggtggca

SEQ ID NO: 861 - RNA, 20 nt, synthetic construct
  source 1..20: mol_type = other RNA
tctgccagctccttctgtag

SEQ ID NO: 862 - RNA, 20 nt, synthetic construct
  source 1..20: mol_type = other RNA
tctgccggcaggcttacctc

SEQ ID NO: 863 - RNA, 20 nt, synthetic construct
  source 1..20: mol_type = other RNA
tctgggcacagaggttggac

SEQ ID NO: 864 - RNA, 20 nt, synthetic construct
  source 1..20: mol_type = other RNA
tctggggatatgggtaattg

SEQ ID NO: 865 - RNA, 20 nt, synthetic construct
  source 1..20: mol_type = other RNA
tctggttgccttggtaggat

SEQ ID NO: 866 - RNA, 20 nt, synthetic construct
  source 1..20: mol_type = other RNA
tctgtaggtggaagagctga

SEQ ID NO: 867 - RNA, 20 nt, synthetic construct
  source 1..20: mol_type = other RNA
tctgtgcccagaaggcctgg

SEQ ID NO: 868 - RNA, 20 nt, synthetic construct
  source 1..20: mol_type = other RNA
tcttcaggggtggcagcggt

SEQ ID NO: 869 - RNA, 20 nt, synthetic construct
  source 1..20: mol_type = other RNA
tcttccacctacagaaggag

SEQ ID NO: 870 - RNA, 20 nt, synthetic construct
  source 1..20: mol_type = other RNA
tcttccctgtccaacctctg

SEQ ID NO: 871 - RNA, 20 nt, synthetic construct
  source 1..20: mol_type = other RNA
tcttctcagtcctgtagagg

SEQ ID NO: 872 - RNA, 20 nt, synthetic construct
  source 1..20: mol_type = other RNA
tcttcttcaggggtggcagc

SEQ ID NO: 873 - RNA, 20 nt, synthetic construct
  source 1..20: mol_type = other RNA
tcttgagcagtcagcaacag

SEQ ID NO: 874 - RNA, 20 nt, synthetic construct
  source 1..20: mol_type = other RNA
tgaaaaacatcacaaggaga

SEQ ID NO: 875 - RNA, 20 nt, synthetic construct
  source 1..20: mol_type = other RNA
tgaaacatccccaggcccaa

SEQ ID NO: 876 - RNA, 20 nt, synthetic construct
  source 1..20: mol_type = other RNA
tgaagaagagagggaaccac

SEQ ID NO: 877 - RNA, 20 nt, synthetic construct
  source 1..20: mol_type = other RNA
tgaagggctgctgcatggca

SEQ ID NO: 878 - RNA, 20 nt, synthetic construct
  source 1..20: mol_type = other RNA
tgacacctcagcctctacag

SEQ ID NO: 879 - RNA, 20 nt, synthetic construct
  source 1..20: mol_type = other RNA
tgaccaggccttctgggcac

SEQ ID NO: 880 - RNA, 20 nt, synthetic construct
  source 1..20: mol_type = other RNA
tgactcaccagctgccatgc

SEQ ID NO: 881 - RNA, 20 nt, synthetic construct
  source 1..20: mol_type = other RNA
tgactgctcaagaggaggca

SEQ ID NO: 882 - RNA, 20 nt, synthetic construct
  source 1..20: mol_type = other RNA
tgagaagaagtaaaaccgtt

SEQ ID NO: 883 - RNA, 20 nt, synthetic construct
  source 1..20: mol_type = other RNA
tgagcagtcagcaacagggt

SEQ ID NO: 884 - RNA, 20 nt, synthetic construct
  source 1..20: mol_type = other RNA
tgaggtgtcaaggacgggac

SEQ ID NO: 885 - RNA, 20 nt, synthetic construct
  source 1..20: mol_type = other RNA
tgagtcaggccagccccagc

SEQ ID NO: 886 - RNA, 20 nt, synthetic construct
  source 1..20: mol_type = other RNA
tgatgtttttcatggttctg

SEQ ID NO: 887 - RNA, 20 nt, synthetic construct
  source 1..20: mol_type = other RNA
tgcagcagcccttcaattac

SEQ ID NO: 888 - RNA, 20 nt, synthetic construct
  source 1..20: mol_type = other RNA
tgcatggcagctggtgagtc

SEQ ID NO: 889 - RNA, 20 nt, synthetic construct
  source 1..20: mol_type = other RNA
tgccacccctgaagaagaga

SEQ ID NO: 890 - RNA, 20 nt, synthetic construct
  source 1..20: mol_type = other RNA
tgccagctccttctgtaggt

SEQ ID NO: 891 - RNA, 20 nt, synthetic construct
  source 1..20: mol_type = other RNA
tgccagctctccctgggccc

SEQ ID NO: 892 - RNA, 20 nt, synthetic construct
  source 1..20: mol_type = other RNA
tgccatgcagcagcccttca

SEQ ID NO: 893 - RNA, 20 nt, synthetic construct
  source 1..20: mol_type = other RNA
tgcccagaaggcctggtcaa

SEQ ID NO: 894 - RNA, 20 nt, synthetic construct
  source 1..20: mol_type = other RNA
tgccggcagactgctgtgcc

SEQ ID NO: 895 - RNA, 20 nt, synthetic construct
  source 1..20: mol_type = other RNA
tgccggcaggcttacctctc

SEQ ID NO: 896 - RNA, 20 nt, synthetic construct
  source 1..20: mol_type = other RNA
tgcctccactaccgctgcca

SEQ ID NO: 897 - RNA, 20 nt, synthetic construct
  source 1..20: mol_type = other RNA
tgcctccagggcacagcagt

SEQ ID NO: 898 - RNA, 20 nt, synthetic construct
  source 1..20: mol_type = other RNA
tgcctcctcttgagcagtca

SEQ ID NO: 899 - RNA, 20 nt, synthetic construct
  source 1..20: mol_type = other RNA
tgcctggaggggcccaggga

SEQ ID NO: 900 - RNA, 20 nt, synthetic construct
  source 1..20: mol_type = other RNA
tgcctggtgcctccagggca

SEQ ID NO: 901 - RNA, 20 nt, synthetic construct
  source 1..20: mol_type = other RNA
tgccttggtaggattgggcc

SEQ ID NO: 902 - RNA, 20 nt, synthetic construct
  source 1..20: mol_type = other RNA
tgctcaagaggaggcaagct

SEQ ID NO: 903 - RNA, 20 nt, synthetic construct
  source 1..20: mol_type = other RNA
tgctgactgctcaagaggag

SEQ ID NO: 904 - RNA, 20 nt, synthetic construct
  source 1..20: mol_type = other RNA
tgctgcatggcagctggtga

SEQ ID NO: 905 - RNA, 20 nt, synthetic construct
  source 1..20: mol_type = other RNA
tgctggggctggcctgactc

SEQ ID NO: 906 - RNA, 20 nt, synthetic construct
  source 1..20: mol_type = other RNA
tgctgtccacccagtagatc

SEQ ID NO: 907 - RNA, 20 nt, synthetic construct
  source 1..20: mol_type = other RNA
tgctgtggttccctctcttc

SEQ ID NO: 908 - RNA, 20 nt, synthetic construct
  source 1..20: mol_type = other RNA
tggaaactctataagagaga

SEQ ID NO: 909 - RNA, 20 nt, synthetic construct
  source 1..20: mol_type = other RNA
tggaagagctgaaacatccc

SEQ ID NO: 910 - RNA, 20 nt, synthetic construct
  source 1..20: mol_type = other RNA
tggacagcagtgccagctct

SEQ ID NO: 911 - RNA, 20 nt, synthetic construct
  source 1..20: mol_type = other RNA
tggacagggaagaactgtgc

SEQ ID NO: 912 - RNA, 20 nt, synthetic construct
  source 1..20: mol_type = other RNA
tggaggcagtggtggcggcg

SEQ ID NO: 913 - RNA, 20 nt, synthetic construct
  source 1..20: mol_type = other RNA
tggaggggcccagggagagc

SEQ ID NO: 914 - RNA, 20 nt, synthetic construct
  source 1..20: mol_type = other RNA
tggatctctcttatagagtt

SEQ ID NO: 915 - RNA, 20 nt, synthetic construct
  source 1..20: mol_type = other RNA
tggcactgctgtccacccag

SEQ ID NO: 916 - RNA, 20 nt, synthetic construct
  source 1..20: mol_type = other RNA
tggcagaactccgagaggta

SEQ ID NO: 917 - RNA, 20 nt, synthetic construct
  source 1..20: mol_type = other RNA
tggcagcggtagtggaggca

SEQ ID NO: 918 - RNA, 20 nt, synthetic construct
  source 1..20: mol_type = other RNA
tggcagctggtgagtcaggc

SEQ ID NO: 919 - RNA, 20 nt, synthetic construct
  source 1..20: mol_type = other RNA
tggcctcctttgaccaggcc

SEQ ID NO: 920 - RNA, 20 nt, synthetic construct
  source 1..20: mol_type = other RNA
tggcctgactcaccagctgc

SEQ ID NO: 921 - RNA, 20 nt, synthetic construct
  source 1..20: mol_type = other RNA
tggcggtggcggtggtggtg

SEQ ID NO: 922 - RNA, 20 nt, synthetic construct
  source 1..20: mol_type = other RNA
tggcggtggtggtggtggcc

SEQ ID NO: 923 - RNA, 20 nt, synthetic construct
  source 1..20: mol_type = other RNA
tgggcacagaggttggacag

SEQ ID NO: 924 - RNA, 20 nt, synthetic construct
  source 1..20: mol_type = other RNA
tgggcccctccaggcacagt

SEQ ID NO: 925 - RNA, 20 nt, synthetic construct
  source 1..20: mol_type = other RNA
tgggcctggggatgtttcag

SEQ ID NO: 926 - RNA, 20 nt, synthetic construct
  source 1..20: mol_type = other RNA
tggggatatgggtaattgaa

SEQ ID NO: 927 - RNA, 20 nt, synthetic construct
  source 1..20: mol_type = other RNA
tggggatgtttcagctcttc

SEQ ID NO: 928 - RNA, 20 nt, synthetic construct
  source 1..20: mol_type = other RNA
tggggctggcctgactcacc

SEQ ID NO: 929 - RNA, 20 nt, synthetic construct
  source 1..20: mol_type = other RNA
tgggtaattgaagggctgct

SEQ ID NO: 930 - RNA, 20 nt, synthetic construct
  source 1..20: mol_type = other RNA
tgggtggacagcagtgccag

SEQ ID NO: 931 - RNA, 20 nt, synthetic construct
  source 1..20: mol_type = other RNA
tggtaggattgggcctgggg

SEQ ID NO: 932 - RNA, 20 nt, synthetic construct
  source 1..20: mol_type = other RNA
tggtagtggtggcggtggcg

SEQ ID NO: 933 - RNA, 20 nt, synthetic construct
  source 1..20: mol_type = other RNA
tggtcaaaggaggccaccac

SEQ ID NO: 934 - RNA, 20 nt, synthetic construct
  source 1..20: mol_type = other RNA
tggtgagtcaggccagcccc

SEQ ID NO: 935 - RNA, 20 nt, synthetic construct
  source 1..20: mol_type = other RNA
tggtgcctccagggcacagc

SEQ ID NO: 936 - RNA, 20 nt, synthetic construct
  source 1..20: mol_type = other RNA
tggtggcctcctttgaccag

SEQ ID NO: 937 - RNA, 20 nt, synthetic construct
  source 1..20: mol_type = other RNA
tggtggcggtggcggtggtg

SEQ ID NO: 938 - RNA, 20 nt, synthetic construct
  source 1..20: mol_type = other RNA
tggtggtggcctcctttgac

SEQ ID NO: 939 - RNA, 20 nt, synthetic construct
  source 1..20: mol_type = other RNA
tggtggtggtggcctccttt

SEQ ID NO: 940 - RNA, 20 nt, synthetic construct
  source 1..20: mol_type = other RNA
tggttccctctcttcttcag

SEQ ID NO: 941 - RNA, 20 nt, synthetic construct
  source 1..20: mol_type = other RNA
tggttctggttgccttggta

SEQ ID NO: 942 - RNA, 20 nt, synthetic construct
  source 1..20: mol_type = other RNA
tggttgccttggtaggattg

SEQ ID NO: 943 - RNA, 20 nt, synthetic construct
  source 1..20: mol_type = other RNA
tgtagaggctgaggtgtcaa

SEQ ID NO: 944 - RNA, 20 nt, synthetic construct
  source 1..20: mol_type = other RNA
tgtaggtggaagagctgaaa

SEQ ID NO: 945 - RNA, 20 nt, synthetic construct
  source 1..20: mol_type = other RNA
tgtcaaggacgggaccctgt

SEQ ID NO: 946 - RNA, 20 nt, synthetic construct
  source 1..20: mol_type = other RNA
tgtccaacctctgtgcccag

SEQ ID NO: 947 - RNA, 20 nt, synthetic construct
  source 1..20: mol_type = other RNA
tgtccacccagtagatctgg

SEQ ID NO: 948 - RNA, 20 nt, synthetic construct
  source 1..20: mol_type = other RNA
tgtctccttgtgatgttttt

SEQ ID NO: 949 - RNA, 20 nt, synthetic construct
  source 1..20: mol_type = other RNA
tgtgatgtttttcatggttc

SEQ ID NO: 950 - RNA, 20 nt, synthetic construct
  source 1..20: mol_type = other RNA
tgtgcccagaaggcctggtc

SEQ ID NO: 951 - RNA, 20 nt, synthetic construct
  source 1..20: mol_type = other RNA
tgtgcctggaggggcccagg

SEQ ID NO: 952 - RNA, 20 nt, synthetic construct
  source 1..20: mol_type = other RNA
tgtgctgtggttccctctct

SEQ ID NO: 953 - RNA, 20 nt, synthetic construct
  source 1..20: mol_type = other RNA
tgtggttccctctcttcttc

SEQ ID NO: 954 - RNA, 20 nt, synthetic construct
  source 1..20: mol_type = other RNA
tgtgtctccttgtgatgttt

SEQ ID NO: 955 - RNA, 20 nt, synthetic construct
  source 1..20: mol_type = other RNA
tgttgctgactgctcaagag

SEQ ID NO: 956 - RNA, 20 nt, synthetic construct
  source 1..20: mol_type = other RNA
tgtttcagctcttccaccta

SEQ ID NO: 957 - RNA, 20 nt, synthetic construct
  source 1..20: mol_type = other RNA
tgtttttcatggttctggtt

SEQ ID NO: 958 - RNA, 20 nt, synthetic construct
  source 1..20: mol_type = other RNA
ttacccatatccccagatct

SEQ ID NO: 959 - RNA, 20 nt, synthetic construct
  source 1..20: mol_type = other RNA
ttacctctcggagttctgcc

SEQ ID NO: 960 - RNA, 20 nt, synthetic construct
  source 1..20: mol_type = other RNA
ttacttcttctcagtcctgt

SEQ ID NO: 961 - RNA, 20 nt, synthetic construct
  source 1..20: mol_type = other RNA
ttagctatggaaactctata

SEQ ID NO: 962 - RNA, 20 nt, synthetic construct
  source 1..20: mol_type = other RNA
ttcaattacccatatcccca

SEQ ID NO: 963 - RNA, 20 nt, synthetic construct
  source 1..20: mol_type = other RNA
ttcagctcttccacctacag

SEQ ID NO: 964 - RNA, 20 nt, synthetic construct
  source 1..20: mol_type = other RNA
ttcaggggtggcagcggtag

SEQ ID NO: 965 - RNA, 20 nt, synthetic construct
  source 1..20: mol_type = other RNA
ttcatggttctggttgcctt

SEQ ID NO: 966 - RNA, 20 nt, synthetic construct
  source 1..20: mol_type = other RNA
ttccacctacagaaggagct

SEQ ID NO: 967 - RNA, 20 nt, synthetic construct
  source 1..20: mol_type = other RNA
ttccctctcttcttcagggg

SEQ ID NO: 968 - RNA, 20 nt, synthetic construct
  source 1..20: mol_type = other RNA
ttccctgtccaacctctgtg

SEQ ID NO: 969 - RNA, 20 nt, synthetic construct
  source 1..20: mol_type = other RNA
ttctcagtcctgtagaggct

SEQ ID NO: 970 - RNA, 20 nt, synthetic construct
  source 1..20: mol_type = other RNA
ttctgccagctccttctgta

SEQ ID NO: 971 - RNA, 20 nt, synthetic construct
  source 1..20: mol_type = other RNA
ttctgggcacagaggttgga

SEQ ID NO: 972 - RNA, 20 nt, synthetic construct
  source 1..20: mol_type = other RNA
ttctggttgccttggtagga

SEQ ID NO: 973 - RNA, 20 nt, synthetic construct
  source 1..20: mol_type = other RNA
ttctgtaggtggaagagctg

SEQ ID NO: 974 - RNA, 20 nt, synthetic construct
  source 1..20: mol_type = other RNA
ttcttcaggggtggcagcgg

SEQ ID NO: 975 - RNA, 20 nt, synthetic construct
  source 1..20: mol_type = other RNA
ttcttccctgtccaacctct

SEQ ID NO: 976 - RNA, 20 nt, synthetic construct
  source 1..20: mol_type = other RNA
ttcttctcagtcctgtagag

SEQ ID NO: 977 - RNA, 20 nt, synthetic construct
  source 1..20: mol_type = other RNA
ttgaagggctgctgcatggc

SEQ ID NO: 978 - RNA, 20 nt, synthetic construct
  source 1..20: mol_type = other RNA
ttgacacctcagcctctaca

SEQ ID NO: 979 - RNA, 20 nt, synthetic construct
  source 1..20: mol_type = other RNA
ttgaccaggccttctgggca

SEQ ID NO: 980 - RNA, 20 nt, synthetic construct
  source 1..20: mol_type = other RNA
ttgagcagtcagcaacaggg

SEQ ID NO: 981 - RNA, 20 nt, synthetic construct
  source 1..20: mol_type = other RNA
ttgcctcctcttgagcagtc

SEQ ID NO: 982 - RNA, 20 nt, synthetic construct
  source 1..20: mol_type = other RNA
ttgccttggtaggattgggc

SEQ ID NO: 983 - RNA, 20 nt, synthetic construct
  source 1..20: mol_type = other RNA
ttgctgactgctcaagagga

SEQ ID NO: 984 - RNA, 20 nt, synthetic construct
  source 1..20: mol_type = other RNA
ttgctggggctggcctgact

SEQ ID NO: 985 - RNA, 20 nt, synthetic construct
  source 1..20: mol_type = other RNA
ttggacagggaagaactgtg

SEQ ID NO: 986 - RNA, 20 nt, synthetic construct
  source 1..20: mol_type = other RNA
ttgggcctggggatgtttca

SEQ ID NO: 987 - RNA, 20 nt, synthetic construct
  source 1..20: mol_type = other RNA
ttggtaggattgggcctggg

SEQ ID NO: 988 - RNA, 20 nt, synthetic construct
  source 1..20: mol_type = other RNA
ttgtgatgtttttcatggtt

SEQ ID NO: 989 - RNA, 20 nt, synthetic construct
  source 1..20: mol_type = other RNA
tttacttcttctcagtcctg

SEQ ID NO: 990 - RNA, 20 nt, synthetic construct
  source 1..20: mol_type = other RNA
tttcagctcttccacctaca

SEQ ID NO: 991 - RNA, 20 nt, synthetic construct
  source 1..20: mol_type = other RNA
tttcatggttctggttgcct

SEQ ID NO: 992 - RNA, 20 nt, synthetic construct
  source 1..20: mol_type = other RNA
tttgaccaggccttctgggc

SEQ ID NO: 993 - RNA, 20 nt, synthetic construct
  source 1..20: mol_type = other RNA
tttgctggggctggcctgac

SEQ ID NO: 994 - RNA, 20 nt, synthetic construct
  source 1..20: mol_type = other RNA
ttttacttcttctcagtcct

SEQ ID NO: 995 - RNA, 20 nt, synthetic construct
  source 1..20: mol_type = other RNA
ttttcatggttctggttgcc

SEQ ID NO: 996 - RNA, 20 nt, synthetic construct
  source 1..20: mol_type = other RNA
tttttcatggttctggttgc

SEQ ID NO: 997 - RNA, 21 nt, synthetic construct
  source 1..21: mol_type = other RNA
aaaaacatcacaaggagacac

SEQ ID NO: 998 - RNA, 21 nt, synthetic construct
  source 1..21: mol_type = other RNA
aaaacatcacaaggagacaca

SEQ ID NO: 999 - RNA, 21 nt, synthetic construct
  source 1..21: mol_type = other RNA
aaaaccgtttgctggggctgg

SEQ ID NO: 1000 - RNA, 21 nt, synthetic construct
  source 1..21: mol_type = other RNA
aaacatcacaaggagacacag

SEQ ID NO: 1001 - RNA, 21 nt, synthetic construct
  source 1..21: mol_type = other RNA
aaacatccccaggcccaatcc

SEQ ID NO: 1002 - RNA, 21 nt, synthetic construct
  source 1..21: mol_type = other RNA
aaaccgtttgctggggctggc

SEQ ID NO: 1003 - RNA, 21 nt, synthetic construct
  source 1..21: mol_type = other RNA
aaacggttttacttcttctca

SEQ ID NO: 1004 - RNA, 21 nt, synthetic construct
  source 1..21: mol_type = other RNA
aaactctataagagagatcca

SEQ ID NO: 1005 - RNA, 21 nt, synthetic construct
  source 1..21: mol_type = other RNA
aaaggaggccaccaccaccac

SEQ ID NO: 1006 - RNA, 21 nt, synthetic construct
  source 1..21: mol_type = other RNA
aacagggtcccgtccttgaca

SEQ ID NO: 1007 - RNA, 21 nt, synthetic construct
  source 1..21: mol_type = other RNA
aacatcacaaggagacacagg

SEQ ID NO: 1008 - RNA, 21 nt, synthetic construct
  source 1..21: mol_type = other RNA
aacatccccaggcccaatcct

SEQ ID NO: 1009 - RNA, 21 nt, synthetic construct
  source 1..21: mol_type = other RNA
aaccacagcacaggcctgtgt

SEQ ID NO: 1010 - RNA, 21 nt, synthetic construct
  source 1..21: mol_type = other RNA
aaccagaaccatgaaaaacat

SEQ ID NO: 1011 - RNA, 21 nt, synthetic construct
  source 1..21: mol_type = other RNA
aaccatgaaaaacatcacaag

SEQ ID NO: 1012 - RNA, 21 nt, synthetic construct
  source 1..21: mol_type = other RNA
aaccgtttgctggggctggcc

SEQ ID NO: 1013 - RNA, 21 nt, synthetic construct
  source 1..21: mol_type = other RNA
aacctctgtgcccagaaggcc

SEQ ID NO: 1014 - RNA, 21 nt, synthetic construct
  source 1..21: mol_type = other RNA
aacggttttacttcttctcag

SEQ ID NO: 1015 - RNA, 21 nt, synthetic construct
  source 1..21: mol_type = other RNA
aactccgagaggtaagcctgc

SEQ ID NO: 1016 - RNA, 21 nt, synthetic construct
  source 1..21: mol_type = other RNA
aactctataagagagatccag

SEQ ID NO: 1017 - RNA, 21 nt, synthetic construct
  source 1..21: mol_type = other RNA
aactgtgcctggaggggccca

SEQ ID NO: 1018 - RNA, 21 nt, synthetic construct
  source 1..21: mol_type = other RNA
aagaactgtgcctggaggggc

SEQ ID NO: 1019 - RNA, 21 nt, synthetic construct
  source 1..21: mol_type = other RNA
aagaagagagggaaccacagc

SEQ ID NO: 1020 - RNA, 21 nt, synthetic construct
  source 1..21: mol_type = other RNA
aagaagtaaaaccgtttgctg

SEQ ID NO: 1021 - RNA, 21 nt, synthetic construct
  source 1..21: mol_type = other RNA
aagagagatccagcttgcctc

SEQ ID NO: 1022 - RNA, 21 nt, synthetic construct
  source 1..21: mol_type = other RNA
aagagagggaaccacagcaca

SEQ ID NO: 1023 - RNA, 21 nt, synthetic construct
  source 1..21: mol_type = other RNA
aagagctgaaacatccccagg

SEQ ID NO: 1024 - RNA, 21 nt, synthetic construct
  source 1..21: mol_type = other RNA
aagaggaggcaagctggatct

SEQ ID NO: 1025 - RNA, 21 nt, synthetic construct
  source 1..21: mol_type = other RNA
aagcctgccggcagactgctg

SEQ ID NO: 1026 - RNA, 21 nt, synthetic construct
  source 1..21: mol_type = other RNA
aagctggatctctcttataga

SEQ ID NO: 1027 - RNA, 21 nt, synthetic construct
  source 1..21: mol_type = other RNA
aaggacgggaccctgttgctg

SEQ ID NO: 1028 - RNA, 21 nt, synthetic construct
  source 1..21: mol_type = other RNA
aaggagacacaggcctgtgct

SEQ ID NO: 1029 - RNA, 21 nt, synthetic construct
  source 1..21: mol_type = other RNA
aaggagctggcagaactccga

SEQ ID NO: 1030 - RNA, 21 nt, synthetic construct
  source 1..21: mol_type = other RNA
aaggaggccaccaccaccacc

SEQ ID NO: 1031 - RNA, 21 nt, synthetic construct
  source 1..21: mol_type = other RNA
aaggcaaccagaaccatgaaa

SEQ ID NO: 1032 - RNA, 21 nt, synthetic construct
  source 1..21: mol_type = other RNA
aaggcctggtcaaaggaggcc

SEQ ID NO: 1033 - RNA, 21 nt, synthetic construct
  source 1..21: mol_type = other RNA
aagggctgctgcatggcagct

SEQ ID NO: 1034 - RNA, 21 nt, synthetic construct
  source 1..21: mol_type = other RNA
aagtaaaaccgtttgctgggg

SEQ ID NO: 1035 - RNA, 21 nt, synthetic construct
  source 1..21: mol_type = other RNA
aatcctaccaaggcaaccaga

SEQ ID NO: 1036 - RNA, 21 nt, synthetic construct
  source 1..21: mol_type = other RNA
aattacccatatccccagatc

SEQ ID NO: 1037 - RNA, 21 nt, synthetic construct
  source 1..21: mol_type = other RNA
aattgaagggctgctgcatgg

SEQ ID NO: 1038 - RNA, 21 nt, synthetic construct
  source 1..21: mol_type = other RNA
acaaggagacacaggcctgtg

SEQ ID NO: 1039 - RNA, 21 nt, synthetic construct
  source 1..21: mol_type = other RNA
acacaggcctgtgctgtggtt

SEQ ID NO: 1040 - RNA, 21 nt, synthetic construct
  source 1..21: mol_type = other RNA
acacctcagcctctacaggac

SEQ ID NO: 1041 - RNA, 21 nt, synthetic construct
  source 1..21: mol_type = other RNA
acagaaggagctggcagaact

SEQ ID NO: 1042 - RNA, 21 nt, synthetic construct
  source 1..21: mol_type = other RNA
acagaggttggacagggaaga

SEQ ID NO: 1043 - RNA, 21 nt, synthetic construct
  source 1..21: mol_type = other RNA
acagcacaggcctgtgtctcc

SEQ ID NO: 1044 - RNA, 21 nt, synthetic construct
  source 1..21: mol_type = other RNA
acagcagtctgccggcaggct

SEQ ID NO: 1045 - RNA, 21 nt, synthetic construct
  source 1..21: mol_type = other RNA
acagcagtgccagctctccct

SEQ ID NO: 1046 - RNA, 21 nt, synthetic construct
  source 1..21: mol_type = other RNA
acaggactgagaagaagtaaa

SEQ ID NO: 1047 - RNA, 21 nt, synthetic construct
  source 1..21: mol_type = other RNA
acaggcctgtgctgtggttcc

SEQ ID NO: 1048 - RNA, 21 nt, synthetic construct
  source 1..21: mol_type = other RNA
acaggcctgtgtctccttgtg

SEQ ID NO: 1049 - RNA, 21 nt, synthetic construct
  source 1..21: mol_type = other RNA
acagggaagaactgtgcctgg

SEQ ID NO: 1050 - RNA, 21 nt, synthetic construct
  source 1..21: mol_type = other RNA
acagggtcccgtccttgacac

SEQ ID NO: 1051 - RNA, 21 nt, synthetic construct
  source 1..21: mol_type = other RNA
acagttcttccctgtccaacc

SEQ ID NO: 1052 - RNA, 21 nt, synthetic construct
  source 1..21: mol_type = other RNA
acatcacaaggagacacaggc

SEQ ID NO: 1053 - RNA, 21 nt, synthetic construct
  source 1..21: mol_type = other RNA
acatccccaggcccaatccta

SEQ ID NO: 1054 - RNA, 21 nt, synthetic construct
  source 1..21: mol_type = other RNA
accaaggcaaccagaaccatg

SEQ ID NO: 1055 - RNA, 21 nt, synthetic construct
  source 1..21: mol_type = other RNA
accacagcacaggcctgtgtc

SEQ ID NO: 1056 - RNA, 21 nt, synthetic construct
  source 1..21: mol_type = other RNA
accaccaccaccgccaccgcc

SEQ ID NO: 1057 - RNA, 21 nt, synthetic construct
  source 1..21: mol_type = other RNA
accaccaccgccaccgccacc

SEQ ID NO: 1058 - RNA, 21 nt, synthetic construct
  source 1..21: mol_type = other RNA
accaccgccaccgccaccact

SEQ ID NO: 1059 - RNA, 21 nt, synthetic construct
  source 1..21: mol_type = other RNA
accactaccacctccgccgcc

SEQ ID NO: 1060 - RNA, 21 nt, synthetic construct
  source 1..21: mol_type = other RNA
accactgcctccactaccgct

SEQ ID NO: 1061 - RNA, 21 nt, synthetic construct
  source 1..21: mol_type = other RNA
accagaaccatgaaaaacatc

SEQ ID NO: 1062 - RNA, 21 nt, synthetic construct
  source 1..21: mol_type = other RNA
accagctgccatgcagcagcc

SEQ ID NO: 1063 - RNA, 21 nt, synthetic construct
  source 1..21: mol_type = other RNA
accaggccttctgggcacaga

SEQ ID NO: 1064 - RNA, 21 nt, synthetic construct
  source 1..21: mol_type = other RNA
accatgaaaaacatcacaagg

SEQ ID NO: 1065 - RNA, 21 nt, synthetic construct
  source 1..21: mol_type = other RNA
acccagtagatctggggatat

SEQ ID NO: 1066 - RNA, 21 nt, synthetic construct
  source 1..21: mol_type = other RNA
acccatatccccagatctact

SEQ ID NO: 1067 - RNA, 21 nt, synthetic construct
  source 1..21: mol_type = other RNA
acccctgaagaagagagggaa

SEQ ID NO: 1068 - RNA, 21 nt, synthetic construct
  source 1..21: mol_type = other RNA
accctgttgctgactgctcaa

SEQ ID NO: 1069 - RNA, 21 nt, synthetic construct
  source 1..21: mol_type = other RNA
accgccaccactaccacctcc

SEQ ID NO: 1070 - RNA, 21 nt, synthetic construct
  source 1..21: mol_type = other RNA
accgccaccgccaccactacc

SEQ ID NO: 1071 - RNA, 21 nt, synthetic construct
  source 1..21: mol_type = other RNA
accgctgccacccctgaagaa

SEQ ID NO: 1072 - RNA, 21 nt, synthetic construct
  source 1..21: mol_type = other RNA
accgtttgctggggctggcct

SEQ ID NO: 1073 - RNA, 21 nt, synthetic construct
  source 1..21: mol_type = other RNA
acctacagaaggagctggcag

SEQ ID NO: 1074 - RNA, 21 nt, synthetic construct
  source 1..21: mol_type = other RNA
acctcagcctctacaggactg

SEQ ID NO: 1075 - RNA, 21 nt, synthetic construct
  source 1..21: mol_type = other RNA
acctctcggagttctgccagc

SEQ ID NO: 1076 - RNA, 21 nt, synthetic construct
  source 1..21: mol_type = other RNA
acctctgtgcccagaaggcct

SEQ ID NO: 1077 - RNA, 21 nt, synthetic construct
  source 1..21: mol_type = other RNA
acgggaccctgttgctgactg

SEQ ID NO: 1078 - RNA, 21 nt, synthetic construct
  source 1..21: mol_type = other RNA
acggttttacttcttctcagt

SEQ ID NO: 1079 - RNA, 21 nt, synthetic construct
  source 1..21: mol_type = other RNA
actaccacctccgccgccgcc

SEQ ID NO: 1080 - RNA, 21 nt, synthetic construct
  source 1..21: mol_type = other RNA
actaccgctgccacccctgaa

SEQ ID NO: 1081 - RNA, 21 nt, synthetic construct
  source 1..21: mol_type = other RNA
actcaccagctgccatgcagc

SEQ ID NO: 1082 - RNA, 21 nt, synthetic construct
  source 1..21: mol_type = other RNA
actccgagaggtaagcctgcc

SEQ ID NO: 1083 - RNA, 21 nt, synthetic construct
  source 1..21: mol_type = other RNA
actctataagagagatccagc

SEQ ID NO: 1084 - RNA, 21 nt, synthetic construct
  source 1..21: mol_type = other RNA
actgagaagaagtaaaaccgt

SEQ ID NO: 1085 - RNA, 21 nt, synthetic construct
  source 1..21: mol_type = other RNA
actgcctccactaccgctgcc

SEQ ID NO: 1086 - RNA, 21 nt, synthetic construct
  source 1..21: mol_type = other RNA
actgctcaagaggaggcaagc

SEQ ID NO: 1087 - RNA, 21 nt, synthetic construct
  source 1..21: mol_type = other RNA
actgctgtccacccagtagat

SEQ ID NO: 1088 - RNA, 21 nt, synthetic construct
  source 1..21: mol_type = other RNA
actgctgtgccctggaggcac

SEQ ID NO: 1089 - RNA, 21 nt, synthetic construct
  source 1..21: mol_type = other RNA
actgggtggacagcagtgcca

SEQ ID NO: 1090 - RNA, 21 nt, synthetic construct
  source 1..21: mol_type = other RNA
actgtgcctggaggggcccag

SEQ ID NO: 1091 - RNA, 21 nt, synthetic construct
  source 1..21: mol_type = other RNA
acttcttctcagtcctgtaga

SEQ ID NO: 1092 - RNA, 21 nt, synthetic construct
  source 1..21: mol_type = other RNA
agaaccatgaaaaacatcaca

SEQ ID NO: 1093 - RNA, 21 nt, synthetic construct
  source 1..21: mol_type = other RNA
agaactccgagaggtaagcct

SEQ ID NO: 1094 - RNA, 21 nt, synthetic construct
  source 1..21: mol_type = other RNA
agaactgtgcctggaggggcc

SEQ ID NO: 1095 - RNA, 21 nt, synthetic construct
  source 1..21: mol_type = other RNA
agaagaagtaaaaccgtttgc

SEQ ID NO: 1096 - RNA, 21 nt, synthetic construct
  source 1..21: mol_type = other RNA
agaagagagggaaccacagca

SEQ ID NO: 1097 - RNA, 21 nt, synthetic construct
  source 1..21: mol_type = other RNA
agaaggagctggcagaactcc

SEQ ID NO: 1098 - RNA, 21 nt, synthetic construct
  source 1..21: mol_type = other RNA
agaaggcctggtcaaaggagg

SEQ ID NO: 1099 - RNA, 21 nt, synthetic construct
  source 1..21: mol_type = other RNA
agaagtaaaaccgtttgctgg

SEQ ID NO: 1100 - RNA, 21 nt, synthetic construct
  source 1..21: mol_type = other RNA
agacacaggcctgtgctgtgg

SEQ ID NO: 1101 - RNA, 21 nt, synthetic construct
  source 1..21: mol_type = other RNA
agactgctgtgccctggaggc

SEQ ID NO: 1102 - RNA, 21 nt, synthetic construct
  source 1..21: mol_type = other RNA
agagagatccagcttgcctcc

SEQ ID NO: 1103 - RNA, 21 nt, synthetic construct
  source 1..21: mol_type = other RNA
agagagggaaccacagcacag

SEQ ID NO: 1104 - RNA, 21 nt, synthetic construct
  source 1..21: mol_type = other RNA
agagatccagcttgcctcctc

SEQ ID NO: 1105 - RNA, 21 nt, synthetic construct
  source 1..21: mol_type = other RNA
agagctgaaacatccccaggc

SEQ ID NO: 1106 - RNA, 21 nt, synthetic construct
  source 1..21: mol_type = other RNA
agagctggcactgctgtccac

SEQ ID NO: 1107 - RNA, 21 nt, synthetic construct
  source 1..21: mol_type = other RNA
agaggaggcaagctggatctc

SEQ ID NO: 1108 - RNA, 21 nt, synthetic construct
  source 1..21: mol_type = other RNA
agaggctgaggtgtcaaggac

SEQ ID NO: 1109 - RNA, 21 nt, synthetic construct
  source 1..21: mol_type = other RNA
agagggaaccacagcacaggc

SEQ ID NO: 1110 - RNA, 21 nt, synthetic construct
  source 1..21: mol_type = other RNA
agaggtaagcctgccggcaga

SEQ ID NO: 1111 - RNA, 21 nt, synthetic construct
  source 1..21: mol_type = other RNA
agaggttggacagggaagaac

SEQ ID NO: 1112 - RNA, 21 nt, synthetic construct
  source 1..21: mol_type = other RNA
agatccagcttgcctcctctt

SEQ ID NO: 1113 - RNA, 21 nt, synthetic construct
  source 1..21: mol_type = other RNA
agatctactgggtggacagca

SEQ ID NO: 1114 - RNA, 21 nt, synthetic construct
  source 1..21: mol_type = other RNA
agatctggggatatgggtaat

SEQ ID NO: 1115 - RNA, 21 nt, synthetic construct
  source 1..21: mol_type = other RNA
agcaaacggttttacttcttc

SEQ ID NO: 1116 - RNA, 21 nt, synthetic construct
  source 1..21: mol_type = other RNA
agcaacagggtcccgtccttg

SEQ ID NO: 1117 - RNA, 21 nt, synthetic construct
  source 1..21: mol_type = other RNA
agcacaggcctgtgtctcctt

SEQ ID NO: 1118 - RNA, 21 nt, synthetic construct
  source 1..21: mol_type = other RNA
agcagcccttcaattacccat

SEQ ID NO: 1119 - RNA, 21 nt, synthetic construct
  source 1..21: mol_type = other RNA
agcagtcagcaacagggtccc

SEQ ID NO: 1120 - RNA, 21 nt, synthetic construct
  source 1..21: mol_type = other RNA
agcagtctgccggcaggctta

SEQ ID NO: 1121 - RNA, 21 nt, synthetic construct
  source 1..21: mol_type = other RNA
agcagtgccagctctccctgg

SEQ ID NO: 1122 - RNA, 21 nt, synthetic construct
  source 1..21: mol_type = other RNA
agccccagcaaacggttttac

SEQ ID NO: 1123 - RNA, 21 nt, synthetic construct
  source 1..21: mol_type = other RNA
agcccttcaattacccatatc

SEQ ID NO: 1124 - RNA, 21 nt, synthetic construct
  source 1..21: mol_type = other RNA
agcctctacaggactgagaag

SEQ ID NO: 1125 - RNA, 21 nt, synthetic construct
  source 1..21: mol_type = other RNA
agcctgccggcagactgctgt

SEQ ID NO: 1126 - RNA, 21 nt, synthetic construct
  source 1..21: mol_type = other RNA
agcggtagtggaggcagtggt

SEQ ID NO: 1127 - RNA, 21 nt, synthetic construct
  source 1..21: mol_type = other RNA
agctatggaaactctataaga

SEQ ID NO: 1128 - RNA, 21 nt, synthetic construct
  source 1..21: mol_type = other RNA
agctccttctgtaggtggaag

SEQ ID NO: 1129 - RNA, 21 nt, synthetic construct
  source 1..21: mol_type = other RNA
agctctccctgggcccctcca

SEQ ID NO: 1130 - RNA, 21 nt, synthetic construct
  source 1..21: mol_type = other RNA
agctcttccacctacagaagg

SEQ ID NO: 1131 - RNA, 21 nt, synthetic construct
  source 1..21: mol_type = other RNA
agctgaaacatccccaggccc

SEQ ID NO: 1132 - RNA, 21 nt, synthetic construct
  source 1..21: mol_type = other RNA
agctgccatgcagcagccctt

SEQ ID NO: 1133 - RNA, 21 nt, synthetic construct
  source 1..21: mol_type = other RNA
agctggatctctcttatagag

SEQ ID NO: 1134 - RNA, 21 nt, synthetic construct
  source 1..21: mol_type = other RNA
agctggcactgctgtccaccc

SEQ ID NO: 1135 - RNA, 21 nt, synthetic construct
  source 1..21: mol_type = other RNA
agctggcagaactccgagagg

SEQ ID NO: 1136 - RNA, 21 nt, synthetic construct
  source 1..21: mol_type = other RNA
agctggtgagtcaggccagcc

SEQ ID NO: 1137 - RNA, 21 nt, synthetic construct
  source 1..21: mol_type = other RNA
agcttgcctcctcttgagcag

SEQ ID NO: 1138 - RNA, 21 nt, synthetic construct
  source 1..21: mol_type = other RNA
aggacgggaccctgttgctga

SEQ ID NO: 1139 - RNA, 21 nt, synthetic construct
  source 1..21: mol_type = other RNA
aggactgagaagaagtaaaac

SEQ ID NO: 1140 - RNA, 21 nt, synthetic construct
  source 1..21: mol_type = other RNA
aggagacacaggcctgtgctg

SEQ ID NO: 1141 - RNA, 21 nt, synthetic construct
  source 1..21: mol_type = other RNA
aggagctggcagaactccgag

SEQ ID NO: 1142 - RNA, 21 nt, synthetic construct
  source 1..21: mol_type = other RNA
aggaggcaagctggatctctc

SEQ ID NO: 1143 - RNA, 21 nt, synthetic construct
  source 1..21: mol_type = other RNA
aggaggccaccaccaccaccg

SEQ ID NO: 1144 - RNA, 21 nt, synthetic construct
  source 1..21: mol_type = other RNA
aggattgggcctggggatgtt

SEQ ID NO: 1145 - RNA, 21 nt, synthetic construct
  source 1..21: mol_type = other RNA
aggcaaccagaaccatgaaaa

SEQ ID NO: 1146 - RNA, 21 nt, synthetic construct
  source 1..21: mol_type = other RNA
aggcaagctggatctctctta

SEQ ID NO: 1147 - RNA, 21 nt, synthetic construct
  source 1..21: mol_type = other RNA
aggcacagttcttccctgtcc

SEQ ID NO: 1148 - RNA, 21 nt, synthetic construct
  source 1..21: mol_type = other RNA
aggccaccaccaccaccgcca

SEQ ID NO: 1149 - RNA, 21 nt, synthetic construct
  source 1..21: mol_type = other RNA
aggccagccccagcaaacggt

SEQ ID NO: 1150 - RNA, 21 nt, synthetic construct
  source 1..21: mol_type = other RNA
aggcccaatcctaccaaggca

SEQ ID NO: 1151 - RNA, 21 nt, synthetic construct
  source 1..21: mol_type = other RNA
aggcctggtcaaaggaggcca

SEQ ID NO: 1152 - RNA, 21 nt, synthetic construct
  source 1..21: mol_type = other RNA
aggcctgtgctgtggttccct

SEQ ID NO: 1153 - RNA, 21 nt, synthetic construct
  source 1..21: mol_type = other RNA
aggcctgtgtctccttgtgat

SEQ ID NO: 1154 - RNA, 21 nt, synthetic construct
  source 1..21: mol_type = other RNA
aggccttctgggcacagaggt

SEQ ID NO: 1155 - RNA, 21 nt, synthetic construct
  source 1..21: mol_type = other RNA
aggctgaggtgtcaaggacgg

SEQ ID NO: 1156 - RNA, 21 nt, synthetic construct
  source 1..21: mol_type = other RNA
aggcttacctctcggagttct

SEQ ID NO: 1157 - RNA, 21 nt, synthetic construct
  source 1..21: mol_type = other RNA
agggaaccacagcacaggcct

SEQ ID NO: 1158 - RNA, 21 nt, synthetic construct
  source 1..21: mol_type = other RNA
agggaagaactgtgcctggag

SEQ ID NO: 1159 - RNA, 21 nt, synthetic construct
  source 1..21: mol_type = other RNA
agggagagctggcactgctgt

SEQ ID NO: 1160 - RNA, 21 nt, synthetic construct
  source 1..21: mol_type = other RNA
agggcacagcagtctgccggc

SEQ ID NO: 1161 - RNA, 21 nt, synthetic construct
  source 1..21: mol_type = other RNA
agggctgctgcatggcagctg

SEQ ID NO: 1162 - RNA, 21 nt, synthetic construct
  source 1..21: mol_type = other RNA
aggggcccagggagagctggc

SEQ ID NO: 1163 - RNA, 21 nt, synthetic construct
  source 1..21: mol_type = other RNA
aggggtggcagcggtagtgga

SEQ ID NO: 1164 - RNA, 21 nt, synthetic construct
  source 1..21: mol_type = other RNA
agggtcccgtccttgacacct

SEQ ID NO: 1165 - RNA, 21 nt, synthetic construct
  source 1..21: mol_type = other RNA
aggtaagcctgccggcagact

SEQ ID NO: 1166 - RNA, 21 nt, synthetic construct
  source 1..21: mol_type = other RNA
aggtggaagagctgaaacatc

SEQ ID NO: 1167 - RNA, 21 nt, synthetic construct
  source 1..21: mol_type = other RNA
aggtggtagtggtggcggtgg

SEQ ID NO: 1168 - RNA, 21 nt, synthetic construct
  source 1..21: mol_type = other RNA
aggtgtcaaggacgggaccct

SEQ ID NO: 1169 - RNA, 21 nt, synthetic construct
  source 1..21: mol_type = other RNA
aggttggacagggaagaactg

SEQ ID NO: 1170 - RNA, 21 nt, synthetic construct
  source 1..21: mol_type = other RNA
agtaaaaccgtttgctggggc

SEQ ID NO: 1171 - RNA, 21 nt, synthetic construct
  source 1..21: mol_type = other RNA
agtagatctggggatatgggt

SEQ ID NO: 1172 - RNA, 21 nt, synthetic construct
  source 1..21: mol_type = other RNA
agtcagcaacagggtcccgtc

SEQ ID NO: 1173 - RNA, 21 nt, synthetic construct
  source 1..21: mol_type = other RNA
agtcaggccagccccagcaaa

SEQ ID NO: 1174 - RNA, 21 nt, synthetic construct
  source 1..21: mol_type = other RNA
agtcctgtagaggctgaggtg

SEQ ID NO: 1175 - RNA, 21 nt, synthetic construct
  source 1..21: mol_type = other RNA
agtctgccggcaggcttacct

SEQ ID NO: 1176 - RNA, 21 nt, synthetic construct
  source 1..21: mol_type = other RNA
agtgccagctctccctgggcc

SEQ ID NO: 1177 - RNA, 21 nt, synthetic construct
  source 1..21: mol_type = other RNA
agtggaggcagtggtggcggc

SEQ ID NO: 1178 - RNA, 21 nt, synthetic construct
  source 1..21: mol_type = other RNA
agttctgccagctccttctgt

SEQ ID NO: 1179 - RNA, 21 nt, synthetic construct
  source 1..21: mol_type = other RNA
agttcttccctgtccaacctc

SEQ ID NO: 1180 - RNA, 21 nt, synthetic construct
  source 1..21: mol_type = other RNA
ataagagagatccagcttgcc

SEQ ID NO: 1181 - RNA, 21 nt, synthetic construct
  source 1..21: mol_type = other RNA
atatccccagatctactgggt

SEQ ID NO: 1182 - RNA, 21 nt, synthetic construct
  source 1..21: mol_type = other RNA
atatgggtaattgaagggctg

SEQ ID NO: 1183 - RNA, 21 nt, synthetic construct
  source 1..21: mol_type = other RNA
atcacaaggagacacaggcct

SEQ ID NO: 1184 - RNA, 21 nt, synthetic construct
  source 1..21: mol_type = other RNA
atccagcttgcctcctcttga

SEQ ID NO: 1185 - RNA, 21 nt, synthetic construct
  source 1..21: mol_type = other RNA
atccccagatctactgggtgg

SEQ ID NO: 1186 - RNA, 21 nt, synthetic construct
  source 1..21: mol_type = other RNA
atccccaggcccaatcctacc

SEQ ID NO: 1187 - RNA, 21 nt, synthetic construct
  source 1..21: mol_type = other RNA
atcctaccaaggcaaccagaa

SEQ ID NO: 1188 - RNA, 21 nt, synthetic construct
  source 1..21: mol_type = other RNA
atctactgggtggacagcagt

SEQ ID NO: 1189 - RNA, 21 nt, synthetic construct
  source 1..21: mol_type = other RNA
atctggggatatgggtaattg

SEQ ID NO: 1190 - RNA, 21 nt, synthetic construct
  source 1..21: mol_type = other RNA
atgaaaaacatcacaaggaga

SEQ ID NO: 1191 - RNA, 21 nt, synthetic construct
  source 1..21: mol_type = other RNA
atgcagcagcccttcaattac

SEQ ID NO: 1192 - RNA, 21 nt, synthetic construct
  source 1..21: mol_type = other RNA
atgcctggtgcctccagggca

SEQ ID NO: 1193 - RNA, 21 nt, synthetic construct
  source 1..21: mol_type = other RNA
atggaaactctataagagaga

SEQ ID NO: 1194 - RNA, 21 nt, synthetic construct
  source 1..21: mol_type = other RNA
atggcagctggtgagtcaggc

SEQ ID NO: 1195 - RNA, 21 nt, synthetic construct
  source 1..21: mol_type = other RNA
atgggtaattgaagggctgct

SEQ ID NO: 1196 - RNA, 21 nt, synthetic construct
  source 1..21: mol_type = other RNA
atggttctggttgccttggta

SEQ ID NO: 1197 - RNA, 21 nt, synthetic construct
  source 1..21: mol_type = other RNA
atgtttcagctcttccaccta

SEQ ID NO: 1198 - RNA, 21 nt, synthetic construct
  source 1..21: mol_type = other RNA
atgtttttcatggttctggtt

SEQ ID NO: 1199 - RNA, 21 nt, synthetic construct
  source 1..21: mol_type = other RNA
attacccatatccccagatct

SEQ ID NO: 1200 - RNA, 21 nt, synthetic construct
  source 1..21: mol_type = other RNA
attgaagggctgctgcatggc

SEQ ID NO: 1201 - RNA, 21 nt, synthetic construct
  source 1..21: mol_type = other RNA
attgggcctggggatgtttca

SEQ ID NO: 1202 - RNA, 21 nt, synthetic construct
  source 1..21: mol_type = other RNA
caaacggttttacttcttctc

SEQ ID NO: 1203 - RNA, 21 nt, synthetic construct
  source 1..21: mol_type = other RNA
caaaggaggccaccaccacca

SEQ ID NO: 1204 - RNA, 21 nt, synthetic construct
  source 1..21: mol_type = other RNA
caacagggtcccgtccttgac

SEQ ID NO: 1205 - RNA, 21 nt, synthetic construct
  source 1..21: mol_type = other RNA
caaccagaaccatgaaaaaca

SEQ ID NO: 1206 - RNA, 21 nt, synthetic construct
  source 1..21: mol_type = other RNA
caacctctgtgcccagaaggc

SEQ ID NO: 1207 - RNA, 21 nt, synthetic construct
  source 1..21: mol_type = other RNA
caagaggaggcaagctggatc

SEQ ID NO: 1208 - RNA, 21 nt, synthetic construct
  source 1..21: mol_type = other RNA
caagctggatctctcttatag

SEQ ID NO: 1209 - RNA, 21 nt, synthetic construct
  source 1..21: mol_type = other RNA
caaggacgggaccctgttgct

SEQ ID NO: 1210 - RNA, 21 nt, synthetic construct
  source 1..21: mol_type = other RNA
caaggagacacaggcctgtgc

SEQ ID NO: 1211 - RNA, 21 nt, synthetic construct
  source 1..21: mol_type = other RNA
caaggcaaccagaaccatgaa

SEQ ID NO: 1212 - RNA, 21 nt, synthetic construct
  source 1..21: mol_type = other RNA
caatcctaccaaggcaaccag

SEQ ID NO: 1213 - RNA, 21 nt, synthetic construct
  source 1..21: mol_type = other RNA
caattacccatatccccagat

SEQ ID NO: 1214 - RNA, 21 nt, synthetic construct
  source 1..21: mol_type = other RNA
cacaaggagacacaggcctgt

SEQ ID NO: 1215 - RNA, 21 nt, synthetic construct
  source 1..21: mol_type = other RNA
cacagaggttggacagggaag

SEQ ID NO: 1216 - RNA, 21 nt, synthetic construct
  source 1..21: mol_type = other RNA
cacagcacaggcctgtgtctc

SEQ ID NO: 1217 - RNA, 21 nt, synthetic construct
  source 1..21: mol_type = other RNA
cacagcagtctgccggcaggc

SEQ ID NO: 1218 - RNA, 21 nt, synthetic construct
  source 1..21: mol_type = other RNA
cacaggcctgtgctgtggttc

SEQ ID NO: 1219 - RNA, 21 nt, synthetic construct
  source 1..21: mol_type = other RNA
cacaggcctgtgtctccttgt

SEQ ID NO: 1220 - RNA, 21 nt, synthetic construct
  source 1..21: mol_type = other RNA
cacagttcttccctgtccaac

SEQ ID NO: 1221 - RNA, 21 nt, synthetic construct
  source 1..21: mol_type = other RNA
caccaccaccaccgccaccgc

SEQ ID NO: 1222 - RNA, 21 nt, synthetic construct
  source 1..21: mol_type = other RNA
caccaccaccgccaccgccac

SEQ ID NO: 1223 - RNA, 21 nt, synthetic construct
  source 1..21: mol_type = other RNA
caccaccgccaccgccaccac

SEQ ID NO: 1224 - RNA, 21 nt, synthetic construct
  source 1..21: mol_type = other RNA
caccactaccacctccgccgc

SEQ ID NO: 1225 - RNA, 21 nt, synthetic construct
  source 1..21: mol_type = other RNA
caccactgcctccactaccgc

SEQ ID NO: 1226 - RNA, 21 nt, synthetic construct
  source 1..21: mol_type = other RNA
caccagctgccatgcagcagc

SEQ ID NO: 1227 - RNA, 21 nt, synthetic construct
  source 1..21: mol_type = other RNA
cacccagtagatctggggata

SEQ ID NO: 1228 - RNA, 21 nt, synthetic construct
  source 1..21: mol_type = other RNA
cacccctgaagaagagaggga

SEQ ID NO: 1229 - RNA, 21 nt, synthetic construct
  source 1..21: mol_type = other RNA
caccgccaccactaccacctc

SEQ ID NO: 1230 - RNA, 21 nt, synthetic construct
  source 1..21: mol_type = other RNA
caccgccaccgccaccactac

SEQ ID NO: 1231 - RNA, 21 nt, synthetic construct
  source 1..21: mol_type = other RNA
cacctacagaaggagctggca

SEQ ID NO: 1232 - RNA, 21 nt, synthetic construct
  source 1..21: mol_type = other RNA
cacctcagcctctacaggact

SEQ ID NO: 1233 - RNA, 21 nt, synthetic construct
  source 1..21: mol_type = other RNA
cactaccacctccgccgccgc

SEQ ID NO: 1234 - RNA, 21 nt, synthetic construct
  source 1..21: mol_type = other RNA
cactaccgctgccacccctga

SEQ ID NO: 1235 - RNA, 21 nt, synthetic construct
  source 1..21: mol_type = other RNA
cactgcctccactaccgctgc

SEQ ID NO: 1236 - RNA, 21 nt, synthetic construct
  source 1..21: mol_type = other RNA
cactgctgtccacccagtaga

SEQ ID NO: 1237 - RNA, 21 nt, synthetic construct
  source 1..21: mol_type = other RNA
cagaaccatgaaaaacatcac

SEQ ID NO: 1238 - RNA, 21 nt, synthetic construct
  source 1..21: mol_type = other RNA
cagaactccgagaggtaagcc

SEQ ID NO: 1239 - RNA, 21 nt, synthetic construct
  source 1..21: mol_type = other RNA
cagaaggagctggcagaactc

SEQ ID NO: 1240 - RNA, 21 nt, synthetic construct
  source 1..21: mol_type = other RNA
cagaaggcctggtcaaaggag

SEQ ID NO: 1241 - RNA, 21 nt, synthetic construct
  source 1..21: mol_type = other RNA
cagactgctgtgccctggagg

SEQ ID NO: 1242 - RNA, 21 nt, synthetic construct
  source 1..21: mol_type = other RNA
cagaggttggacagggaagaa

SEQ ID NO: 1243 - RNA, 21 nt, synthetic construct
  source 1..21: mol_type = other RNA
cagatctactgggtggacagc

SEQ ID NO: 1244 - RNA, 21 nt, synthetic construct
  source 1..21: mol_type = other RNA
cagcaaacggttttacttctt

SEQ ID NO: 1245 - RNA, 21 nt, synthetic construct
  source 1..21: mol_type = other RNA
cagcaacagggtcccgtcctt

SEQ ID NO: 1246 - RNA, 21 nt, synthetic construct
  source 1..21: mol_type = other RNA
cagcacaggcctgtgtctcct

SEQ ID NO: 1247 - RNA, 21 nt, synthetic construct
  source 1..21: mol_type = other RNA
cagcagcccttcaattaccca

SEQ ID NO: 1248 - RNA, 21 nt, synthetic construct
  source 1..21: mol_type = other RNA
cagcagtctgccggcaggctt

SEQ ID NO: 1249 - RNA, 21 nt, synthetic construct
  source 1..21: mol_type = other RNA
cagcagtgccagctctccctg

SEQ ID NO: 1250 - RNA, 21 nt, synthetic construct
  source 1..21: mol_type = other RNA
cagccccagcaaacggtttta

SEQ ID NO: 1251 - RNA, 21 nt, synthetic construct
  source 1..21: mol_type = other RNA
cagcccttcaattacccatat

SEQ ID NO: 1252 - RNA, 21 nt, synthetic construct
  source 1..21: mol_type = other RNA
cagcctctacaggactgagaa

SEQ ID NO: 1253 - RNA, 21 nt, synthetic construct
  source 1..21: mol_type = other RNA
cagcggtagtggaggcagtgg

SEQ ID NO: 1254 - RNA, 21 nt, synthetic construct
  source 1..21: mol_type = other RNA
cagctccttctgtaggtggaa

SEQ ID NO: 1255 - RNA, 21 nt, synthetic construct
  source 1..21: mol_type = other RNA
cagctctccctgggcccctcc

SEQ ID NO: 1256 - RNA, 21 nt, synthetic construct
  source 1..21: mol_type = other RNA
cagctcttccacctacagaag

SEQ ID NO: 1257 - RNA, 21 nt, synthetic construct
  source 1..21: mol_type = other RNA
cagctgccatgcagcagccct

SEQ ID NO: 1258 - RNA, 21 nt, synthetic construct
  source 1..21: mol_type = other RNA
cagctggtgagtcaggccagc

SEQ ID NO: 1259 - RNA, 21 nt, synthetic construct
  source 1..21: mol_type = other RNA
cagcttgcctcctcttgagca

SEQ ID NO: 1260 - RNA, 21 nt, synthetic construct
  source 1..21: mol_type = other RNA
caggactgagaagaagtaaaa

SEQ ID NO: 1261 - RNA, 21 nt, synthetic construct
  source 1..21: mol_type = other RNA
caggcacagttcttccctgtc

SEQ ID NO: 1262 - RNA, 21 nt, synthetic construct
  source 1..21: mol_type = other RNA
caggccagccccagcaaacgg

SEQ ID NO: 1263 - RNA, 21 nt, synthetic construct
  source 1..21: mol_type = other RNA
caggcccaatcctaccaaggc

SEQ ID NO: 1264 - RNA, 21 nt, synthetic construct
  source 1..21: mol_type = other RNA
caggcctgtgctgtggttccc

SEQ ID NO: 1265 - RNA, 21 nt, synthetic construct
  source 1..21: mol_type = other RNA
caggcctgtgtctccttgtga

SEQ ID NO: 1266 - RNA, 21 nt, synthetic construct
  source 1..21: mol_type = other RNA
caggccttctgggcacagagg

SEQ ID NO: 1267 - RNA, 21 nt, synthetic construct
  source 1..21: mol_type = other RNA
caggcttacctctcggagttc

SEQ ID NO: 1268 - RNA, 21 nt, synthetic construct
  source 1..21: mol_type = other RNA
cagggaagaactgtgcctgga

SEQ ID NO: 1269 - RNA, 21 nt, synthetic construct
  source 1..21: mol_type = other RNA
cagggagagctggcactgctg

SEQ ID NO: 1270 - RNA, 21 nt, synthetic construct
  source 1..21: mol_type = other RNA
cagggcacagcagtctgccgg

SEQ ID NO: 1271 - RNA, 21 nt, synthetic construct
  source 1..21: mol_type = other RNA
caggggtggcagcggtagtgg

SEQ ID NO: 1272 - RNA, 21 nt, synthetic construct
  source 1..21: mol_type = other RNA
cagggtcccgtccttgacacc

SEQ ID NO: 1273 - RNA, 21 nt, synthetic construct
  source 1..21: mol_type = other RNA
cagtagatctggggatatggg

SEQ ID NO: 1274 - RNA, 21 nt, synthetic construct
  source 1..21: mol_type = other RNA
cagtcagcaacagggtcccgt

SEQ ID NO: 1275 - RNA, 21 nt, synthetic construct
  source 1..21: mol_type = other RNA
cagtcctgtagaggctgaggt

SEQ ID NO: 1276 - RNA, 21 nt, synthetic construct
  source 1..21: mol_type = other RNA
cagtctgccggcaggcttacc

SEQ ID NO: 1277 - RNA, 21 nt, synthetic construct
  source 1..21: mol_type = other RNA
cagtgccagctctccctgggc

SEQ ID NO: 1278 - RNA, 21 nt, synthetic construct
  source 1..21: mol_type = other RNA
cagttcttccctgtccaacct

SEQ ID NO: 1279 - RNA, 21 nt, synthetic construct
  source 1..21: mol_type = other RNA
catatccccagatctactggg

SEQ ID NO: 1280 - RNA, 21 nt, synthetic construct
  source 1..21: mol_type = other RNA
catcacaaggagacacaggcc

SEQ ID NO: 1281 - RNA, 21 nt, synthetic construct
  source 1..21: mol_type = other RNA
catccccaggcccaatcctac

SEQ ID NO: 1282 - RNA, 21 nt, synthetic construct
  source 1..21: mol_type = other RNA
catgaaaaacatcacaaggag

SEQ ID NO: 1283 - RNA, 21 nt, synthetic construct
  source 1..21: mol_type = other RNA
catgcagcagcccttcaatta

SEQ ID NO: 1284 - RNA, 21 nt, synthetic construct
  source 1..21: mol_type = other RNA
catggcagctggtgagtcagg

SEQ ID NO: 1285 - RNA, 21 nt, synthetic construct
  source 1..21: mol_type = other RNA
catggttctggttgccttggt

SEQ ID NO: 1286 - RNA, 21 nt, synthetic construct
  source 1..21: mol_type = other RNA
ccaacctctgtgcccagaagg

SEQ ID NO: 1287 - RNA, 21 nt, synthetic construct
  source 1..21: mol_type = other RNA
ccaaggcaaccagaaccatga

SEQ ID NO: 1288 - RNA, 21 nt, synthetic construct
  source 1..21: mol_type = other RNA
ccaatcctaccaaggcaacca

SEQ ID NO: 1289 - RNA, 21 nt, synthetic construct
  source 1..21: mol_type = other RNA
ccacagcacaggcctgtgtct

SEQ ID NO: 1290 - RNA, 21 nt, synthetic construct
  source 1..21: mol_type = other RNA
ccaccaccaccgccaccgcca

SEQ ID NO: 1291 - RNA, 21 nt, synthetic construct
  source 1..21: mol_type = other RNA
ccaccaccgccaccgccacca

SEQ ID NO: 1292 - RNA, 21 nt, synthetic construct
  source 1..21: mol_type = other RNA
ccaccactaccacctccgccg

SEQ ID NO: 1293 - RNA, 21 nt, synthetic construct
  source 1..21: mol_type = other RNA
ccaccactgcctccactaccg

SEQ ID NO: 1294 - RNA, 21 nt, synthetic construct
  source 1..21: mol_type = other RNA
ccacccagtagatctggggat

SEQ ID NO: 1295 - RNA, 21 nt, synthetic construct
  source 1..21: mol_type = other RNA
ccacccctgaagaagagaggg

SEQ ID NO: 1296 - RNA, 21 nt, synthetic construct
  source 1..21: mol_type = other RNA
ccaccgccaccactaccacct

SEQ ID NO: 1297 - RNA, 21 nt, synthetic construct
  source 1..21: mol_type = other RNA
ccaccgccaccgccaccacta

SEQ ID NO: 1298 - RNA, 21 nt, synthetic construct
  source 1..21: mol_type = other RNA
ccacctacagaaggagctggc

SEQ ID NO: 1299 - RNA, 21 nt, synthetic construct
  source 1..21: mol_type = other RNA
ccactaccacctccgccgccg

SEQ ID NO: 1300 - RNA, 21 nt, synthetic construct
  source 1..21: mol_type = other RNA
ccactaccgctgccacccctg

SEQ ID NO: 1301 - RNA, 21 nt, synthetic construct
  source 1..21: mol_type = other RNA
ccactgcctccactaccgctg

SEQ ID NO: 1302 - RNA, 21 nt, synthetic construct
  source 1..21: mol_type = other RNA
ccagaaccatgaaaaacatca

SEQ ID NO: 1303 - RNA, 21 nt, synthetic construct
  source 1..21: mol_type = other RNA
ccagaaggcctggtcaaagga

SEQ ID NO: 1304 - RNA, 21 nt, synthetic construct
  source 1..21: mol_type = other RNA
ccagatctactgggtggacag

SEQ ID NO: 1305 - RNA, 21 nt, synthetic construct
  source 1..21: mol_type = other RNA
ccagcaaacggttttacttct

SEQ ID NO: 1306 - RNA, 21 nt, synthetic construct
  source 1..21: mol_type = other RNA
ccagccccagcaaacggtttt

SEQ ID NO: 1307 - RNA, 21 nt, synthetic construct
  source 1..21: mol_type = other RNA
ccagctccttctgtaggtgga

SEQ ID NO: 1308 - RNA, 21 nt, synthetic construct
  source 1..21: mol_type = other RNA
ccagctctccctgggcccctc

SEQ ID NO: 1309 - RNA, 21 nt, synthetic construct
  source 1..21: mol_type = other RNA
ccagctgccatgcagcagccc

SEQ ID NO: 1310 - RNA, 21 nt, synthetic construct
  source 1..21: mol_type = other RNA
ccagcttgcctcctcttgagc

SEQ ID NO: 1311 - RNA, 21 nt, synthetic construct
  source 1..21: mol_type = other RNA
ccaggcacagttcttccctgt

SEQ ID NO: 1312 - RNA, 21 nt, synthetic construct
  source 1..21: mol_type = other RNA
ccaggcccaatcctaccaagg

SEQ ID NO: 1313 - RNA, 21 nt, synthetic construct
  source 1..21: mol_type = other RNA
ccaggccttctgggcacagag

SEQ ID NO: 1314 - RNA, 21 nt, synthetic construct
  source 1..21: mol_type = other RNA
ccagggagagctggcactgct

SEQ ID NO: 1315 - RNA, 21 nt, synthetic construct
  source 1..21: mol_type = other RNA
ccagggcacagcagtctgccg

SEQ ID NO: 1316 - RNA, 21 nt, synthetic construct
  source 1..21: mol_type = other RNA
ccagtagatctggggatatgg

SEQ ID NO: 1317 - RNA, 21 nt, synthetic construct
  source 1..21: mol_type = other RNA
ccatatccccagatctactgg

SEQ ID NO: 1318 - RNA, 21 nt, synthetic construct
  source 1..21: mol_type = other RNA
ccatgaaaaacatcacaagga

SEQ ID NO: 1319 - RNA, 21 nt, synthetic construct
  source 1..21: mol_type = other RNA
ccatgcagcagcccttcaatt

SEQ ID NO: 1320 - RNA, 21 nt, synthetic construct
  source 1..21: mol_type = other RNA
cccaatcctaccaaggcaacc

SEQ ID NO: 1321 - RNA, 21 nt, synthetic construct
  source 1..21: mol_type = other RNA
cccagaaggcctggtcaaagg

SEQ ID NO: 1322 - RNA, 21 nt, synthetic construct
  source 1..21: mol_type = other RNA
cccagatctactgggtggaca

SEQ ID NO: 1323 - RNA, 21 nt, synthetic construct
  source 1..21: mol_type = other RNA
cccagcaaacggttttacttc

SEQ ID NO: 1324 - RNA, 21 nt, synthetic construct
  source 1..21: mol_type = other RNA
cccaggcccaatcctaccaag

SEQ ID NO: 1325 - RNA, 21 nt, synthetic construct
  source 1..21: mol_type = other RNA
cccagggagagctggcactgc

SEQ ID NO: 1326 - RNA, 21 nt, synthetic construct
  source 1..21: mol_type = other RNA
cccagtagatctggggatatg

SEQ ID NO: 1327 - RNA, 21 nt, synthetic construct
  source 1..21: mol_type = other RNA
cccatatccccagatctactg

SEQ ID NO: 1328 - RNA, 21 nt, synthetic construct
  source 1..21: mol_type = other RNA
ccccagatctactgggtggac

SEQ ID NO: 1329 - RNA, 21 nt, synthetic construct
  source 1..21: mol_type = other RNA
ccccagcaaacggttttactt

SEQ ID NO: 1330 - RNA, 21 nt, synthetic construct
  source 1..21: mol_type = other RNA
ccccaggcccaatcctaccaa

SEQ ID NO: 1331 - RNA, 21 nt, synthetic construct
  source 1..21: mol_type = other RNA
cccctccaggcacagttcttc

SEQ ID NO: 1332 - RNA, 21 nt, synthetic construct
  source 1..21: mol_type = other RNA
cccctgaagaagagagggaac

SEQ ID NO: 1333 - RNA, 21 nt, synthetic construct
  source 1..21: mol_type = other RNA
cccgtccttgacacctcagcc

SEQ ID NO: 1334 - RNA, 21 nt, synthetic construct
  source 1..21: mol_type = other RNA
ccctccaggcacagttcttcc

SEQ ID NO: 1335 - RNA, 21 nt, synthetic construct
  source 1..21: mol_type = other RNA
ccctctcttcttcaggggtgg

SEQ ID NO: 1336 - RNA, 21 nt, synthetic construct
  source 1..21: mol_type = other RNA
ccctgaagaagagagggaacc

SEQ ID NO: 1337 - RNA, 21 nt, synthetic construct
  source 1..21: mol_type = other RNA
ccctgggcccctccaggcaca

SEQ ID NO: 1338 - RNA, 21 nt, synthetic construct
  source 1..21: mol_type = other RNA
ccctgtccaacctctgtgccc

SEQ ID NO: 1339 - RNA, 21 nt, synthetic construct
  source 1..21: mol_type = other RNA
ccctgttgctgactgctcaag

SEQ ID NO: 1340 - RNA, 21 nt, synthetic construct
  source 1..21: mol_type = other RNA
cccttcaattacccatatccc

SEQ ID NO: 1341 - RNA, 21 nt, synthetic construct
  source 1..21: mol_type = other RNA
ccgagaggtaagcctgccggc

SEQ ID NO: 1342 - RNA, 21 nt, synthetic construct
  source 1..21: mol_type = other RNA
ccgccaccactaccacctccg

SEQ ID NO: 1343 - RNA, 21 nt, synthetic construct
  source 1..21: mol_type = other RNA
ccgccaccactgcctccacta

SEQ ID NO: 1344 - RNA, 21 nt, synthetic construct
  source 1..21: mol_type = other RNA
ccgccaccgccaccactacca

SEQ ID NO: 1345 - RNA, 21 nt, synthetic construct
  source 1..21: mol_type = other RNA
ccgccgccaccactgcctcca

SEQ ID NO: 1346 - RNA, 21 nt, synthetic construct
  source 1..21: mol_type = other RNA
ccgctgccacccctgaagaag

SEQ ID NO: 1347 - RNA, 21 nt, synthetic construct
  source 1..21: mol_type = other RNA
ccggcagactgctgtgccctg

SEQ ID NO: 1348 - RNA, 21 nt, synthetic construct
  source 1..21: mol_type = other RNA
ccggcaggcttacctctcgga

SEQ ID NO: 1349 - RNA, 21 nt, synthetic construct
  source 1..21: mol_type = other RNA
ccgtccttgacacctcagcct

SEQ ID NO: 1350 - RNA, 21 nt, synthetic construct
  source 1..21: mol_type = other RNA
ccgtttgctggggctggcctg

SEQ ID NO: 1351 - RNA, 21 nt, synthetic construct
  source 1..21: mol_type = other RNA
cctacagaaggagctggcaga

SEQ ID NO: 1352 - RNA, 21 nt, synthetic construct
  source 1..21: mol_type = other RNA
cctaccaaggcaaccagaacc

SEQ ID NO: 1353 - RNA, 21 nt, synthetic construct
  source 1..21: mol_type = other RNA
cctcagcctctacaggactga

SEQ ID NO: 1354 - RNA, 21 nt, synthetic construct
  source 1..21: mol_type = other RNA
cctccactaccgctgccaccc

SEQ ID NO: 1355 - RNA, 21 nt, synthetic construct
  source 1..21: mol_type = other RNA
cctccaggcacagttcttccc

SEQ ID NO: 1356 - RNA, 21 nt, synthetic construct
  source 1..21: mol_type = other RNA
cctccagggcacagcagtctg

SEQ ID NO: 1357 - RNA, 21 nt, synthetic construct
  source 1..21: mol_type = other RNA
cctcctcttgagcagtcagca

SEQ ID NO: 1358 - RNA, 21 nt, synthetic construct
  source 1..21: mol_type = other RNA
cctcctttgaccaggccttct

SEQ ID NO: 1359 - RNA, 21 nt, synthetic construct
  source 1..21: mol_type = other RNA
cctctacaggactgagaagaa

SEQ ID NO: 1360 - RNA, 21 nt, synthetic construct
  source 1..21: mol_type = other RNA
cctctcggagttctgccagct

SEQ ID NO: 1361 - RNA, 21 nt, synthetic construct
  source 1..21: mol_type = other RNA
cctctcttcttcaggggtggc

SEQ ID NO: 1362 - RNA, 21 nt, synthetic construct
  source 1..21: mol_type = other RNA
cctctgtgcccagaaggcctg

SEQ ID NO: 1363 - RNA, 21 nt, synthetic construct
  source 1..21: mol_type = other RNA
cctcttgagcagtcagcaaca

SEQ ID NO: 1364 - RNA, 21 nt, synthetic construct
  source 1..21: mol_type = other RNA
cctgaagaagagagggaacca

SEQ ID NO: 1365 - RNA, 21 nt, synthetic construct
  source 1..21: mol_type = other RNA
cctgactcaccagctgccatg

SEQ ID NO: 1366 - RNA, 21 nt, synthetic construct
  source 1..21: mol_type = other RNA
cctgccggcagactgctgtgc

SEQ ID NO: 1367 - RNA, 21 nt, synthetic construct
  source 1..21: mol_type = other RNA
cctggaggggcccagggagag

SEQ ID NO: 1368 - RNA, 21 nt, synthetic construct
  source 1..21: mol_type = other RNA
cctgggcccctccaggcacag

SEQ ID NO: 1369 - RNA, 21 nt, synthetic construct
  source 1..21: mol_type = other RNA
cctggggatgtttcagctctt

SEQ ID NO: 1370 - RNA, 21 nt, synthetic construct
  source 1..21: mol_type = other RNA
cctggtcaaaggaggccacca

SEQ ID NO: 1371 - RNA, 21 nt, synthetic construct
  source 1..21: mol_type = other RNA
cctggtgcctccagggcacag

SEQ ID NO: 1372 - RNA, 21 nt, synthetic construct
  source 1..21: mol_type = other RNA
cctgtagaggctgaggtgtca

SEQ ID NO: 1373 - RNA, 21 nt, synthetic construct
  source 1..21: mol_type = other RNA
cctgtccaacctctgtgccca

SEQ ID NO: 1374 - RNA, 21 nt, synthetic construct
  source 1..21: mol_type = other RNA
cctgtgctgtggttccctctc

SEQ ID NO: 1375 - RNA, 21 nt, synthetic construct
  source 1..21: mol_type = other RNA
cctgtgtctccttgtgatgtt

SEQ ID NO: 1376 - RNA, 21 nt, synthetic construct
  source 1..21: mol_type = other RNA
cctgttgctgactgctcaaga

SEQ ID NO: 1377 - RNA, 21 nt, synthetic construct
  source 1..21: mol_type = other RNA
ccttcaattacccatatcccc

SEQ ID NO: 1378 - RNA, 21 nt, synthetic construct
  source 1..21: mol_type = other RNA
ccttctgggcacagaggttgg

SEQ ID NO: 1379 - RNA, 21 nt, synthetic construct
  source 1..21: mol_type = other RNA
ccttctgtaggtggaagagct

SEQ ID NO: 1380 - RNA, 21 nt, synthetic construct
  source 1..21: mol_type = other RNA
ccttgacacctcagcctctac

SEQ ID NO: 1381 - RNA, 21 nt, synthetic construct
  source 1..21: mol_type = other RNA
ccttggtaggattgggcctgg

SEQ ID NO: 1382 - RNA, 21 nt, synthetic construct
  source 1..21: mol_type = other RNA
ccttgtgatgtttttcatggt

SEQ ID NO: 1383 - RNA, 21 nt, synthetic construct
  source 1..21: mol_type = other RNA
cctttgaccaggccttctggg

SEQ ID NO: 1384 - RNA, 21 nt, synthetic construct
  source 1..21: mol_type = other RNA
cgagaggtaagcctgccggca

SEQ ID NO: 1385 - RNA, 21 nt, synthetic construct
  source 1..21: mol_type = other RNA
cgccaccactaccacctccgc

SEQ ID NO: 1386 - RNA, 21 nt, synthetic construct
  source 1..21: mol_type = other RNA
cgccaccactgcctccactac

SEQ ID NO: 1387 - RNA, 21 nt, synthetic construct
  source 1..21: mol_type = other RNA
cgccaccgccaccactaccac

SEQ ID NO: 1388 - RNA, 21 nt, synthetic construct
  source 1..21: mol_type = other RNA
cgccgccaccactgcctccac

SEQ ID NO: 1389 - RNA, 21 nt, synthetic construct
  source 1..21: mol_type = other RNA
cgctgccacccctgaagaaga

SEQ ID NO: 1390 - RNA, 21 nt, synthetic construct
  source 1..21: mol_type = other RNA
cggaggtggtagtggtggcgg

SEQ ID NO: 1391 - RNA, 21 nt, synthetic construct
  source 1..21: mol_type = other RNA
cggagttctgccagctccttc

SEQ ID NO: 1392 - RNA, 21 nt, synthetic construct
  source 1..21: mol_type = other RNA
cggcagactgctgtgccctgg

SEQ ID NO: 1393 - RNA, 21 nt, synthetic construct
  source 1..21: mol_type = other RNA
cggcaggcttacctctcggag

SEQ ID NO: 1394 - RNA, 21 nt, synthetic construct
  source 1..21: mol_type = other RNA
cggcggaggtggtagtggtgg

SEQ ID NO: 1395 - RNA, 21 nt, synthetic construct
  source 1..21: mol_type = other RNA
cggcggcggaggtggtagtgg

SEQ ID NO: 1396 - RNA, 21 nt, synthetic construct
  source 1..21: mol_type = other RNA
cgggaccctgttgctgactgc

SEQ ID NO: 1397 - RNA, 21 nt, synthetic construct
  source 1..21: mol_type = other RNA
cggtagtggaggcagtggtgg

SEQ ID NO: 1398 - RNA, 21 nt, synthetic construct
  source 1..21: mol_type = other RNA
cggtggcggtggtggtggtgg

SEQ ID NO: 1399 - RNA, 21 nt, synthetic construct
  source 1..21: mol_type = other RNA
cggtggtggtggtggcctcct

SEQ ID NO: 1400 - RNA, 21 nt, synthetic construct
  source 1..21: mol_type = other RNA
cggttttacttcttctcagtc

SEQ ID NO: 1401 - RNA, 21 nt, synthetic construct
  source 1..21: mol_type = other RNA
cgtccttgacacctcagcctc

SEQ ID NO: 1402 - RNA, 21 nt, synthetic construct
  source 1..21: mol_type = other RNA
cgtttgctggggctggcctga

SEQ ID NO: 1403 - RNA, 21 nt, synthetic construct
  source 1..21: mol_type = other RNA
ctacagaaggagctggcagaa

SEQ ID NO: 1404 - RNA, 21 nt, synthetic construct
  source 1..21: mol_type = other RNA
ctacaggactgagaagaagta

SEQ ID NO: 1405 - RNA, 21 nt, synthetic construct
  source 1..21: mol_type = other RNA
ctaccaaggcaaccagaacca

SEQ ID NO: 1406 - RNA, 21 nt, synthetic construct
  source 1..21: mol_type = other RNA
ctaccgctgccacccctgaag

SEQ ID NO: 1407 - RNA, 21 nt, synthetic construct
  source 1..21: mol_type = other RNA
ctactgggtggacagcagtgc

SEQ ID NO: 1408 - RNA, 21 nt, synthetic construct
  source 1..21: mol_type = other RNA
ctataagagagatccagcttg

SEQ ID NO: 1409 - RNA, 21 nt, synthetic construct
  source 1..21: mol_type = other RNA
ctatggaaactctataagaga

SEQ ID NO: 1410 - RNA, 21 nt, synthetic construct
  source 1..21: mol_type = other RNA
ctcaagaggaggcaagctgga

SEQ ID NO: 1411 - RNA, 21 nt, synthetic construct
  source 1..21: mol_type = other RNA
ctcaccagctgccatgcagca

SEQ ID NO: 1412 - RNA, 21 nt, synthetic construct
  source 1..21: mol_type = other RNA
ctcagcctctacaggactgag

SEQ ID NO: 1413 - RNA, 21 nt, synthetic construct
  source 1..21: mol_type = other RNA
ctcagtcctgtagaggctgag

SEQ ID NO: 1414 - RNA, 21 nt, synthetic construct
  source 1..21: mol_type = other RNA
ctccactaccgctgccacccc

SEQ ID NO: 1415 - RNA, 21 nt, synthetic construct
  source 1..21: mol_type = other RNA
ctccaggcacagttcttccct

SEQ ID NO: 1416 - RNA, 21 nt, synthetic construct
  source 1..21: mol_type = other RNA
ctccagggcacagcagtctgc

SEQ ID NO: 1417 - RNA, 21 nt, synthetic construct
  source 1..21: mol_type = other RNA
ctccctgggcccctccaggca

SEQ ID NO: 1418 - RNA, 21 nt, synthetic construct
  source 1..21: mol_type = other RNA
ctccgagaggtaagcctgccg

SEQ ID NO: 1419 - RNA, 21 nt, synthetic construct
  source 1..21: mol_type = other RNA
ctcctcttgagcagtcagcaa

SEQ ID NO: 1420 - RNA, 21 nt, synthetic construct
  source 1..21: mol_type = other RNA
ctccttctgtaggtggaagag

SEQ ID NO: 1421 - RNA, 21 nt, synthetic construct
  source 1..21: mol_type = other RNA
ctccttgtgatgtttttcatg

SEQ ID NO: 1422 - RNA, 21 nt, synthetic construct
  source 1..21: mol_type = other RNA
ctcctttgaccaggccttctg

SEQ ID NO: 1423 - RNA, 21 nt, synthetic construct
  source 1..21: mol_type = other RNA
ctcggagttctgccagctcct

SEQ ID NO: 1424 - RNA, 21 nt, synthetic construct
  source 1..21: mol_type = other RNA
ctctacaggactgagaagaag

SEQ ID NO: 1425 - RNA, 21 nt, synthetic construct
  source 1..21: mol_type = other RNA
ctctataagagagatccagct

SEQ ID NO: 1426 - RNA, 21 nt, synthetic construct
  source 1..21: mol_type = other RNA
ctctccctgggcccctccagg

SEQ ID NO: 1427 - RNA, 21 nt, synthetic construct
  source 1..21: mol_type = other RNA
ctctcggagttctgccagctc

SEQ ID NO: 1428 - RNA, 21 nt, synthetic construct
  source 1..21: mol_type = other RNA
ctctcttcttcaggggtggca

SEQ ID NO: 1429 - RNA, 21 nt, synthetic construct
  source 1..21: mol_type = other RNA
ctctgtgcccagaaggcctgg

SEQ ID NO: 1430 - RNA, 21 nt, synthetic construct
  source 1..21: mol_type = other RNA
ctcttccacctacagaaggag

SEQ ID NO: 1431 - RNA, 21 nt, synthetic construct
  source 1..21: mol_type = other RNA
ctcttcttcaggggtggcagc

SEQ ID NO: 1432 - RNA, 21 nt, synthetic construct
  source 1..21: mol_type = other RNA
ctcttgagcagtcagcaacag

SEQ ID NO: 1433 - RNA, 21 nt, synthetic construct
  source 1..21: mol_type = other RNA
ctgaaacatccccaggcccaa

SEQ ID NO: 1434 - RNA, 21 nt, synthetic construct
  source 1..21: mol_type = other RNA
ctgaagaagagagggaaccac

SEQ ID NO: 1435 - RNA, 21 nt, synthetic construct
  source 1..21: mol_type = other RNA
ctgactcaccagctgccatgc

SEQ ID NO: 1436 - RNA, 21 nt, synthetic construct
  source 1..21: mol_type = other RNA
ctgactgctcaagaggaggca

SEQ ID NO: 1437 - RNA, 21 nt, synthetic construct
  source 1..21: mol_type = other RNA
ctgagaagaagtaaaaccgtt

SEQ ID NO: 1438 - RNA, 21 nt, synthetic construct
  source 1..21: mol_type = other RNA
ctgaggtgtcaaggacgggac

SEQ ID NO: 1439 - RNA, 21 nt, synthetic construct
  source 1..21: mol_type = other RNA
ctgcatggcagctggtgagtc

SEQ ID NO: 1440 - RNA, 21 nt, synthetic construct
  source 1..21: mol_type = other RNA
ctgccacccctgaagaagaga

SEQ ID NO: 1441 - RNA, 21 nt, synthetic construct
  source 1..21: mol_type = other RNA
ctgccagctccttctgtaggt

SEQ ID NO: 1442 - RNA, 21 nt, synthetic construct
  source 1..21: mol_type = other RNA
ctgccatgcagcagcccttca

SEQ ID NO: 1443 - RNA, 21 nt, synthetic construct
  source 1..21: mol_type = other RNA
ctgccggcagactgctgtgcc

SEQ ID NO: 1444 - RNA, 21 nt, synthetic construct
  source 1..21: mol_type = other RNA
ctgccggcaggcttacctctc

SEQ ID NO: 1445 - RNA, 21 nt, synthetic construct
  source 1..21: mol_type = other RNA
ctgcctccactaccgctgcca

SEQ ID NO: 1446 - RNA, 21 nt, synthetic construct
  source 1..21: mol_type = other RNA
ctgctcaagaggaggcaagct

SEQ ID NO: 1447 - RNA, 21 nt, synthetic construct
  source 1..21: mol_type = other RNA
ctgctgcatggcagctggtga

SEQ ID NO: 1448 - RNA, 21 nt, synthetic construct
  source 1..21: mol_type = other RNA
ctgctgtccacccagtagatc

SEQ ID NO: 1449 - RNA, 21 nt, synthetic construct
  source 1..21: mol_type = other RNA
ctggaggggcccagggagagc

SEQ ID NO: 1450 - RNA, 21 nt, synthetic construct
  source 1..21: mol_type = other RNA
ctggatctctcttatagagtt

SEQ ID NO: 1451 - RNA, 21 nt, synthetic construct
  source 1..21: mol_type = other RNA
ctggcactgctgtccacccag

SEQ ID NO: 1452 - RNA, 21 nt, synthetic construct
  source 1..21: mol_type = other RNA
ctggcagaactccgagaggta

SEQ ID NO: 1453 - RNA, 21 nt, synthetic construct
  source 1..21: mol_type = other RNA
ctggcctgactcaccagctgc

SEQ ID NO: 1454 - RNA, 21 nt, synthetic construct
  source 1..21: mol_type = other RNA
ctgggcacagaggttggacag

SEQ ID NO: 1455 - RNA, 21 nt, synthetic construct
  source 1..21: mol_type = other RNA
ctgggcccctccaggcacagt

SEQ ID NO: 1456 - RNA, 21 nt, synthetic construct
  source 1..21: mol_type = other RNA
ctggggatatgggtaattgaa

SEQ ID NO: 1457 - RNA, 21 nt, synthetic construct
  source 1..21: mol_type = other RNA
ctggggatgtttcagctcttc

SEQ ID NO: 1458 - RNA, 21 nt, synthetic construct
  source 1..21: mol_type = other RNA
ctggggctggcctgactcacc

SEQ ID NO: 1459 - RNA, 21 nt, synthetic construct
  source 1..21: mol_type = other RNA
ctgggtggacagcagtgccag

SEQ ID NO: 1460 - RNA, 21 nt, synthetic construct
  source 1..21: mol_type = other RNA
ctggtcaaaggaggccaccac

SEQ ID NO: 1461 - RNA, 21 nt, synthetic construct
  source 1..21: mol_type = other RNA
ctggtgagtcaggccagcccc

SEQ ID NO: 1462 - RNA, 21 nt, synthetic construct
  source 1..21: mol_type = other RNA
ctggtgcctccagggcacagc

SEQ ID NO: 1463 - RNA, 21 nt, synthetic construct
  source 1..21: mol_type = other RNA
ctggttgccttggtaggattg

SEQ ID NO: 1464 - RNA, 21 nt, synthetic construct
  source 1..21: mol_type = other RNA
ctgtagaggctgaggtgtcaa

SEQ ID NO: 1465 - RNA, 21 nt, synthetic construct
  source 1..21: mol_type = other RNA
ctgtaggtggaagagctgaaa

SEQ ID NO: 1466 - RNA, 21 nt, synthetic construct
  source 1..21: mol_type = other RNA
ctgtccaacctctgtgcccag

SEQ ID NO: 1467 - RNA, 21 nt, synthetic construct
  source 1..21: mol_type = other RNA
ctgtccacccagtagatctgg

SEQ ID NO: 1468 - RNA, 21 nt, synthetic construct
  source 1..21: mol_type = other RNA
ctgtgcccagaaggcctggtc

SEQ ID NO: 1469 - RNA, 21 nt, synthetic construct
  source 1..21: mol_type = other RNA
ctgtgcctggaggggcccagg

SEQ ID NO: 1470 - RNA, 21 nt, synthetic construct
  source 1..21: mol_type = other RNA
ctgtgctgtggttccctctct

SEQ ID NO: 1471 - RNA, 21 nt, synthetic construct
  source 1..21: mol_type = other RNA
ctgtggttccctctcttcttc

SEQ ID NO: 1472 - RNA, 21 nt, synthetic construct
  source 1..21: mol_type = other RNA
ctgtgtctccttgtgatgttt

SEQ ID NO: 1473 - RNA, 21 nt, synthetic construct
  source 1..21: mol_type = other RNA
ctgttgctgactgctcaagag

SEQ ID NO: 1474 - RNA, 21 nt, synthetic construct
  source 1..21: mol_type = other RNA
cttacctctcggagttctgcc

SEQ ID NO: 1475 - RNA, 21 nt, synthetic construct
  source 1..21: mol_type = other RNA
cttcaattacccatatcccca

SEQ ID NO: 1476 - RNA, 21 nt, synthetic construct
  source 1..21: mol_type = other RNA
cttcaggggtggcagcggtag

SEQ ID NO: 1477 - RNA, 21 nt, synthetic construct
  source 1..21: mol_type = other RNA
cttccacctacagaaggagct

SEQ ID NO: 1478 - RNA, 21 nt, synthetic construct
  source 1..21: mol_type = other RNA
cttccctgtccaacctctgtg

SEQ ID NO: 1479 - RNA, 21 nt, synthetic construct
  source 1..21: mol_type = other RNA
cttctcagtcctgtagaggct

SEQ ID NO: 1480 - RNA, 21 nt, synthetic construct
  source 1..21: mol_type = other RNA
cttctgggcacagaggttgga

SEQ ID NO: 1481 - RNA, 21 nt, synthetic construct
  source 1..21: mol_type = other RNA
cttctgtaggtggaagagctg

SEQ ID NO: 1482 - RNA, 21 nt, synthetic construct
  source 1..21: mol_type = other RNA
cttcttcaggggtggcagcgg

SEQ ID NO: 1483 - RNA, 21 nt, synthetic construct
  source 1..21: mol_type = other RNA
cttcttctcagtcctgtagag

SEQ ID NO: 1484 - RNA, 21 nt, synthetic construct
  source 1..21: mol_type = other RNA
cttgacacctcagcctctaca

SEQ ID NO: 1485 - RNA, 21 nt, synthetic construct
  source 1..21: mol_type = other RNA
cttgagcagtcagcaacaggg

SEQ ID NO: 1486 - RNA, 21 nt, synthetic construct
  source 1..21: mol_type = other RNA
cttgcctcctcttgagcagtc

SEQ ID NO: 1487 - RNA, 21 nt, synthetic construct
  source 1..21: mol_type = other RNA
cttggtaggattgggcctggg

SEQ ID NO: 1488 - RNA, 21 nt, synthetic construct
  source 1..21: mol_type = other RNA
cttgtgatgtttttcatggtt

SEQ ID NO: 1489 - RNA, 21 nt, synthetic construct
  source 1..21: mol_type = other RNA
ctttgaccaggccttctgggc

SEQ ID NO: 1490 - RNA, 21 nt, synthetic construct
  source 1..21: mol_type = other RNA
gaaaaacatcacaaggagaca

SEQ ID NO: 1491 - RNA, 21 nt, synthetic construct
  source 1..21: mol_type = other RNA
gaaacatccccaggcccaatc

SEQ ID NO: 1492 - RNA, 21 nt, synthetic construct
  source 1..21: mol_type = other RNA
gaaactctataagagagatcc

SEQ ID NO: 1493 - RNA, 21 nt, synthetic construct
  source 1..21: mol_type = other RNA
gaaccacagcacaggcctgtg

SEQ ID NO: 1494 - RNA, 21 nt, synthetic construct
  source 1..21: mol_type = other RNA
gaaccatgaaaaacatcacaa

SEQ ID NO: 1495 - RNA, 21 nt, synthetic construct
  source 1..21: mol_type = other RNA
gaactccgagaggtaagcctg

SEQ ID NO: 1496 - RNA, 21 nt, synthetic construct
  source 1..21: mol_type = other RNA
gaactgtgcctggaggggccc

SEQ ID NO: 1497 - RNA, 21 nt, synthetic construct
  source 1..21: mol_type = other RNA
gaagaactgtgcctggagggg

SEQ ID NO: 1498 - RNA, 21 nt, synthetic construct
  source 1..21: mol_type = other RNA
gaagaagagagggaaccacag

SEQ ID NO: 1499 - RNA, 21 nt, synthetic construct
  source 1..21: mol_type = other RNA
gaagaagtaaaaccgtttgct

SEQ ID NO: 1500 - RNA, 21 nt, synthetic construct
  source 1..21: mol_type = other RNA
gaagagagggaaccacagcac

SEQ ID NO: 1501 - RNA, 21 nt, synthetic construct
  source 1..21: mol_type = other RNA
gaagagctgaaacatccccag

SEQ ID NO: 1502 - RNA, 21 nt, synthetic construct
  source 1..21: mol_type = other RNA
gaaggagctggcagaactccg

SEQ ID NO: 1503 - RNA, 21 nt, synthetic construct
  source 1..21: mol_type = other RNA
gaaggcctggtcaaaggaggc

SEQ ID NO: 1504 - RNA, 21 nt, synthetic construct
  source 1..21: mol_type = other RNA
gaagggctgctgcatggcagc

SEQ ID NO: 1505 - RNA, 21 nt, synthetic construct
  source 1..21: mol_type = other RNA
gaagtaaaaccgtttgctggg

SEQ ID NO: 1506 - RNA, 21 nt, synthetic construct
  source 1..21: mol_type = other RNA
gacacaggcctgtgctgtggt

SEQ ID NO: 1507 - RNA, 21 nt, synthetic construct
  source 1..21: mol_type = other RNA
gacacctcagcctctacagga

SEQ ID NO: 1508 - RNA, 21 nt, synthetic construct
  source 1..21: mol_type = other RNA
gacagcagtgccagctctccc

SEQ ID NO: 1509 - RNA, 21 nt, synthetic construct
  source 1..21: mol_type = other RNA
gacagggaagaactgtgcctg

SEQ ID NO: 1510 - RNA, 21 nt, synthetic construct
  source 1..21: mol_type = other RNA
gaccaggccttctgggcacag

SEQ ID NO: 1511 - RNA, 21 nt, synthetic construct
  source 1..21: mol_type = other RNA
gaccctgttgctgactgctca

SEQ ID NO: 1512 - RNA, 21 nt, synthetic construct
  source 1..21: mol_type = other RNA
gacgggaccctgttgctgact

SEQ ID NO: 1513 - RNA, 21 nt, synthetic construct
  source 1..21: mol_type = other RNA
gactcaccagctgccatgcag

SEQ ID NO: 1514 - RNA, 21 nt, synthetic construct
  source 1..21: mol_type = other RNA
gactgagaagaagtaaaaccg

SEQ ID NO: 1515 - RNA, 21 nt, synthetic construct
  source 1..21: mol_type = other RNA
gactgctcaagaggaggcaag

SEQ ID NO: 1516 - RNA, 21 nt, synthetic construct
  source 1..21: mol_type = other RNA
gactgctgtgccctggaggca

SEQ ID NO: 1517 - RNA, 21 nt, synthetic construct
  source 1..21: mol_type = other RNA
gagaagaagtaaaaccgtttg

SEQ ID NO: 1518 - RNA, 21 nt, synthetic construct
  source 1..21: mol_type = other RNA
gagacacaggcctgtgctgtg

SEQ ID NO: 1519 - RNA, 21 nt, synthetic construct
  source 1..21: mol_type = other RNA
gagagatccagcttgcctcct

SEQ ID NO: 1520 - RNA, 21 nt, synthetic construct
  source 1..21: mol_type = other RNA
gagagctggcactgctgtcca

SEQ ID NO: 1521 - RNA, 21 nt, synthetic construct
  source 1..21: mol_type = other RNA
gagagggaaccacagcacagg

SEQ ID NO: 1522 - RNA, 21 nt, synthetic construct
  source 1..21: mol_type = other RNA
gagaggtaagcctgccggcag

SEQ ID NO: 1523 - RNA, 21 nt, synthetic construct
  source 1..21: mol_type = other RNA
gagatccagcttgcctcctct

SEQ ID NO: 1524 - RNA, 21 nt, synthetic construct
  source 1..21: mol_type = other RNA
gagcagtcagcaacagggtcc

SEQ ID NO: 1525 - RNA, 21 nt, synthetic construct
  source 1..21: mol_type = other RNA
gagctgaaacatccccaggcc

SEQ ID NO: 1526 - RNA, 21 nt, synthetic construct
  source 1..21: mol_type = other RNA
gagctggcactgctgtccacc

SEQ ID NO: 1527 - RNA, 21 nt, synthetic construct
  source 1..21: mol_type = other RNA
gagctggcagaactccgagag

SEQ ID NO: 1528 - RNA, 21 nt, synthetic construct
  source 1..21: mol_type = other RNA
gaggaggcaagctggatctct

SEQ ID NO: 1529 - RNA, 21 nt, synthetic construct
  source 1..21: mol_type = other RNA
gaggcaagctggatctctctt

SEQ ID NO: 1530 - RNA, 21 nt, synthetic construct
  source 1..21: mol_type = other RNA
gaggccaccaccaccaccgcc

SEQ ID NO: 1531 - RNA, 21 nt, synthetic construct
  source 1..21: mol_type = other RNA
gaggctgaggtgtcaaggacg

SEQ ID NO: 1532 - RNA, 21 nt, synthetic construct
  source 1..21: mol_type = other RNA
gagggaaccacagcacaggcc

SEQ ID NO: 1533 - RNA, 21 nt, synthetic construct
  source 1..21: mol_type = other RNA
gaggggcccagggagagctgg

SEQ ID NO: 1534 - RNA, 21 nt, synthetic construct
  source 1..21: mol_type = other RNA
gaggtaagcctgccggcagac

SEQ ID NO: 1535 - RNA, 21 nt, synthetic construct
  source 1..21: mol_type = other RNA
gaggtggtagtggtggcggtg

SEQ ID NO: 1536 - RNA, 21 nt, synthetic construct
  source 1..21: mol_type = other RNA
gaggtgtcaaggacgggaccc

SEQ ID NO: 1537 - RNA, 21 nt, synthetic construct
  source 1..21: mol_type = other RNA
gaggttggacagggaagaact

SEQ ID NO: 1538 - RNA, 21 nt, synthetic construct
  source 1..21: mol_type = other RNA
gagtcaggccagccccagcaa

SEQ ID NO: 1539 - RNA, 21 nt, synthetic construct
  source 1..21: mol_type = other RNA
gagttctgccagctccttctg

SEQ ID NO: 1540 - RNA, 21 nt, synthetic construct
  source 1..21: mol_type = other RNA
gatatgggtaattgaagggct

SEQ ID NO: 1541 - RNA, 21 nt, synthetic construct
  source 1..21: mol_type = other RNA
gatccagcttgcctcctcttg

SEQ ID NO: 1542 - RNA, 21 nt, synthetic construct
  source 1..21: mol_type = other RNA
gatctactgggtggacagcag

SEQ ID NO: 1543 - RNA, 21 nt, synthetic construct
  source 1..21: mol_type = other RNA
gatctctcttatagagtttcc

SEQ ID NO: 1544 - RNA, 21 nt, synthetic construct
  source 1..21: mol_type = other RNA
gatctggggatatgggtaatt

SEQ ID NO: 1545 - RNA, 21 nt, synthetic construct
  source 1..21: mol_type = other RNA
gatgtttcagctcttccacct

SEQ ID NO: 1546 - RNA, 21 nt, synthetic construct
  source 1..21: mol_type = other RNA
gatgtttttcatggttctggt

SEQ ID NO: 1547 - RNA, 21 nt, synthetic construct
  source 1..21: mol_type = other RNA
gattgggcctggggatgtttc

SEQ ID NO: 1548 - RNA, 21 nt, synthetic construct
  source 1..21: mol_type = other RNA
gcaaacggttttacttcttct

SEQ ID NO: 1549 - RNA, 21 nt, synthetic construct
  source 1..21: mol_type = other RNA
gcaacagggtcccgtccttga

SEQ ID NO: 1550 - RNA, 21 nt, synthetic construct
  source 1..21: mol_type = other RNA
gcaaccagaaccatgaaaaac

SEQ ID NO: 1551 - RNA, 21 nt, synthetic construct
  source 1..21: mol_type = other RNA
gcaagctggatctctcttata

SEQ ID NO: 1552 - RNA, 21 nt, synthetic construct
  source 1..21: mol_type = other RNA
gcacagaggttggacagggaa

SEQ ID NO: 1553 - RNA, 21 nt, synthetic construct
  source 1..21: mol_type = other RNA
gcacagcagtctgccggcagg

SEQ ID NO: 1554 - RNA, 21 nt, synthetic construct
  source 1..21: mol_type = other RNA
gcacaggcctgtgtctccttg

SEQ ID NO: 1555 - RNA, 21 nt, synthetic construct
  source 1..21: mol_type = other RNA
gcacagttcttccctgtccaa

SEQ ID NO: 1556 - RNA, 21 nt, synthetic construct
  source 1..21: mol_type = other RNA
gcactgctgtccacccagtag

SEQ ID NO: 1557 - RNA, 21 nt, synthetic construct
  source 1..21: mol_type = other RNA
gcagaactccgagaggtaagc

SEQ ID NO: 1558 - RNA, 21 nt, synthetic construct
  source 1..21: mol_type = other RNA
gcagactgctgtgccctggag

SEQ ID NO: 1559 - RNA, 21 nt, synthetic construct
  source 1..21: mol_type = other RNA
gcagcagcccttcaattaccc

SEQ ID NO: 1560 - RNA, 21 nt, synthetic construct
  source 1..21: mol_type = other RNA
gcagcccttcaattacccata

SEQ ID NO: 1561 - RNA, 21 nt, synthetic construct
  source 1..21: mol_type = other RNA
gcagcggtagtggaggcagtg

SEQ ID NO: 1562 - RNA, 21 nt, synthetic construct
  source 1..21: mol_type = other RNA
gcagctggtgagtcaggccag

SEQ ID NO: 1563 - RNA, 21 nt, synthetic construct
  source 1..21: mol_type = other RNA
gcaggcttacctctcggagtt

SEQ ID NO: 1564 - RNA, 21 nt, synthetic construct
  source 1..21: mol_type = other RNA
gcagtcagcaacagggtcccg

SEQ ID NO: 1565 - RNA, 21 nt, synthetic construct
  source 1..21: mol_type = other RNA
gcagtctgccggcaggcttac

SEQ ID NO: 1566 - RNA, 21 nt, synthetic construct
  source 1..21: mol_type = other RNA
gcagtgccagctctccctggg

SEQ ID NO: 1567 - RNA, 21 nt, synthetic construct
  source 1..21: mol_type = other RNA
gcatggcagctggtgagtcag

SEQ ID NO: 1568 - RNA, 21 nt, synthetic construct
  source 1..21: mol_type = other RNA
gccaccaccaccaccgccacc

SEQ ID NO: 1569 - RNA, 21 nt, synthetic construct
  source 1..21: mol_type = other RNA
gccaccactaccacctccgcc

SEQ ID NO: 1570 - RNA, 21 nt, synthetic construct
  source 1..21: mol_type = other RNA
gccaccactgcctccactacc

SEQ ID NO: 1571 - RNA, 21 nt, synthetic construct
  source 1..21: mol_type = other RNA
gccacccctgaagaagagagg

SEQ ID NO: 1572 - RNA, 21 nt, synthetic construct
  source 1..21: mol_type = other RNA
gccaccgccaccactaccacc

SEQ ID NO: 1573 - RNA, 21 nt, synthetic construct
  source 1..21: mol_type = other RNA
gccagccccagcaaacggttt

SEQ ID NO: 1574 - RNA, 21 nt, synthetic construct
  source 1..21: mol_type = other RNA
gccagctccttctgtaggtgg

SEQ ID NO: 1575 - RNA, 21 nt, synthetic construct
  source 1..21: mol_type = other RNA
gccagctctccctgggcccct

SEQ ID NO: 1576 - RNA, 21 nt, synthetic construct
  source 1..21: mol_type = other RNA
gccatgcagcagcccttcaat

SEQ ID NO: 1577 - RNA, 21 nt, synthetic construct
  source 1..21: mol_type = other RNA
gcccaatcctaccaaggcaac

SEQ ID NO: 1578 - RNA, 21 nt, synthetic construct
  source 1..21: mol_type = other RNA
gcccagaaggcctggtcaaag

SEQ ID NO: 1579 - RNA, 21 nt, synthetic construct
  source 1..21: mol_type = other RNA
gcccagggagagctggcactg

SEQ ID NO: 1580 - RNA, 21 nt, synthetic construct
  source 1..21: mol_type = other RNA
gccccagcaaacggttttact

SEQ ID NO: 1581 - RNA, 21 nt, synthetic construct
  source 1..21: mol_type = other RNA
gcccctccaggcacagttctt

SEQ ID NO: 1582 - RNA, 21 nt, synthetic construct
  source 1..21: mol_type = other RNA
gcccttcaattacccatatcc

SEQ ID NO: 1583 - RNA, 21 nt, synthetic construct
  source 1..21: mol_type = other RNA
gccgccaccactgcctccact

SEQ ID NO: 1584 - RNA, 21 nt, synthetic construct
  source 1..21: mol_type = other RNA
gccggcagactgctgtgccct

SEQ ID NO: 1585 - RNA, 21 nt, synthetic construct
  source 1..21: mol_type = other RNA
gccggcaggcttacctctcgg

SEQ ID NO: 1586 - RNA, 21 nt, synthetic construct
  source 1..21: mol_type = other RNA
gcctccactaccgctgccacc

SEQ ID NO: 1587 - RNA, 21 nt, synthetic construct
  source 1..21: mol_type = other RNA
gcctccagggcacagcagtct

SEQ ID NO: 1588 - RNA, 21 nt, synthetic construct
  source 1..21: mol_type = other RNA
gcctcctcttgagcagtcagc

SEQ ID NO: 1589 - RNA, 21 nt, synthetic construct
  source 1..21: mol_type = other RNA
gcctcctttgaccaggccttc

SEQ ID NO: 1590 - RNA, 21 nt, synthetic construct
  source 1..21: mol_type = other RNA
gcctctacaggactgagaaga

SEQ ID NO: 1591 - RNA, 21 nt, synthetic construct
  source 1..21: mol_type = other RNA
gcctgactcaccagctgccat

SEQ ID NO: 1592 - RNA, 21 nt, synthetic construct
  source 1..21: mol_type = other RNA
gcctgccggcagactgctgtg

SEQ ID NO: 1593 - RNA, 21 nt, synthetic construct
  source 1..21: mol_type = other RNA
gcctggaggggcccagggaga

SEQ ID NO: 1594 - RNA, 21 nt, synthetic construct
  source 1..21: mol_type = other RNA
gcctggggatgtttcagctct

SEQ ID NO: 1595 - RNA, 21 nt, synthetic construct
  source 1..21: mol_type = other RNA
gcctggtcaaaggaggccacc

SEQ ID NO: 1596 - RNA, 21 nt, synthetic construct
  source 1..21: mol_type = other RNA
gcctggtgcctccagggcaca

SEQ ID NO: 1597 - RNA, 21 nt, synthetic construct
  source 1..21: mol_type = other RNA
gcctgtgctgtggttccctct

SEQ ID NO: 1598 - RNA, 21 nt, synthetic construct
  source 1..21: mol_type = other RNA
gcctgtgtctccttgtgatgt

SEQ ID NO: 1599 - RNA, 21 nt, synthetic construct
  source 1..21: mol_type = other RNA
gccttctgggcacagaggttg

SEQ ID NO: 1600 - RNA, 21 nt, synthetic construct
  source 1..21: mol_type = other RNA
gccttggtaggattgggcctg

SEQ ID NO: 1601 - RNA, 21 nt, synthetic construct
  source 1..21: mol_type = other RNA
gcggaggtggtagtggtggcg

SEQ ID NO: 1602 - RNA, 21 nt, synthetic construct
  source 1..21: mol_type = other RNA
gcggcggaggtggtagtggtg

SEQ ID NO: 1603 - RNA, 21 nt, synthetic construct
  source 1..21: mol_type = other RNA
gcggcggcggaggtggtagtg

SEQ ID NO: 1604 - RNA, 21 nt, synthetic construct
  source 1..21: mol_type = other RNA
gcggtagtggaggcagtggtg

SEQ ID NO: 1605 - RNA, 21 nt, synthetic construct
  source 1..21: mol_type = other RNA
gcggtggcggtggtggtggtg

SEQ ID NO: 1606 - RNA, 21 nt, synthetic construct
  source 1..21: mol_type = other RNA
gcggtggtggtggtggcctcc

SEQ ID NO: 1607 - RNA, 21 nt, synthetic construct
  source 1..21: mol_type = other RNA
gctatggaaactctataagag

SEQ ID NO: 1608 - RNA, 21 nt, synthetic construct
  source 1..21: mol_type = other RNA
gctcaagaggaggcaagctgg

SEQ ID NO: 1609 - RNA, 21 nt, synthetic construct
  source 1..21: mol_type = other RNA
gctccttctgtaggtggaaga

SEQ ID NO: 1610 - RNA, 21 nt, synthetic construct
  source 1..21: mol_type = other RNA
gctctccctgggcccctccag

SEQ ID NO: 1611 - RNA, 21 nt, synthetic construct
  source 1..21: mol_type = other RNA
gctcttccacctacagaagga

SEQ ID NO: 1612 - RNA, 21 nt, synthetic construct
  source 1..21: mol_type = other RNA
gctgaaacatccccaggccca

SEQ ID NO: 1613 - RNA, 21 nt, synthetic construct
  source 1..21: mol_type = other RNA
gctgactgctcaagaggaggc

SEQ ID NO: 1614 - RNA, 21 nt, synthetic construct
  source 1..21: mol_type = other RNA
gctgaggtgtcaaggacggga

SEQ ID NO: 1615 - RNA, 21 nt, synthetic construct
  source 1..21: mol_type = other RNA
gctgcatggcagctggtgagt

SEQ ID NO: 1616 - RNA, 21 nt, synthetic construct
  source 1..21: mol_type = other RNA
gctgccacccctgaagaagag

SEQ ID NO: 1617 - RNA, 21 nt, synthetic construct
  source 1..21: mol_type = other RNA
gctgccatgcagcagcccttc

SEQ ID NO: 1618 - RNA, 21 nt, synthetic construct
  source 1..21: mol_type = other RNA
gctgctgcatggcagctggtg

SEQ ID NO: 1619 - RNA, 21 nt, synthetic construct
  source 1..21: mol_type = other RNA
gctggatctctcttatagagt

SEQ ID NO: 1620 - RNA, 21 nt, synthetic construct
  source 1..21: mol_type = other RNA
gctggcactgctgtccaccca

SEQ ID NO: 1621 - RNA, 21 nt, synthetic construct
  source 1..21: mol_type = other RNA
gctggcagaactccgagaggt

SEQ ID NO: 1622 - RNA, 21 nt, synthetic construct
  source 1..21: mol_type = other RNA
gctggcctgactcaccagctg

SEQ ID NO: 1623 - RNA, 21 nt, synthetic construct
  source 1..21: mol_type = other RNA
gctggggctggcctgactcac

SEQ ID NO: 1624 - RNA, 21 nt, synthetic construct
  source 1..21: mol_type = other RNA
gctggtgagtcaggccagccc

SEQ ID NO: 1625 - RNA, 21 nt, synthetic construct
  source 1..21: mol_type = other RNA
gctgtccacccagtagatctg

SEQ ID NO: 1626 - RNA, 21 nt, synthetic construct
  source 1..21: mol_type = other RNA
gctgtggttccctctcttctt

SEQ ID NO: 1627 - RNA, 21 nt, synthetic construct
  source 1..21: mol_type = other RNA
gcttacctctcggagttctgc

SEQ ID NO: 1628 - RNA, 21 nt, synthetic construct
  source 1..21: mol_type = other RNA
gcttgcctcctcttgagcagt

SEQ ID NO: 1629 - RNA, 21 nt, synthetic construct
  source 1..21: mol_type = other RNA
ggaaactctataagagagatc

SEQ ID NO: 1630 - RNA, 21 nt, synthetic construct
  source 1..21: mol_type = other RNA
ggaaccacagcacaggcctgt

SEQ ID NO: 1631 - RNA, 21 nt, synthetic construct
  source 1..21: mol_type = other RNA
ggaagaactgtgcctggaggg

SEQ ID NO: 1632 - RNA, 21 nt, synthetic construct
  source 1..21: mol_type = other RNA
ggaagagctgaaacatcccca

SEQ ID NO: 1633 - RNA, 21 nt, synthetic construct
  source 1..21: mol_type = other RNA
ggacagcagtgccagctctcc

SEQ ID NO: 1634 - RNA, 21 nt, synthetic construct
  source 1..21: mol_type = other RNA
ggacagggaagaactgtgcct

SEQ ID NO: 1635 - RNA, 21 nt, synthetic construct
  source 1..21: mol_type = other RNA
ggaccctgttgctgactgctc

SEQ ID NO: 1636 - RNA, 21 nt, synthetic construct
  source 1..21: mol_type = other RNA
ggacgggaccctgttgctgac

SEQ ID NO: 1637 - RNA, 21 nt, synthetic construct
  source 1..21: mol_type = other RNA
ggactgagaagaagtaaaacc

SEQ ID NO: 1638 - RNA, 21 nt, synthetic construct
  source 1..21: mol_type = other RNA
ggagacacaggcctgtgctgt

SEQ ID NO: 1639 - RNA, 21 nt, synthetic construct
  source 1..21: mol_type = other RNA
ggagagctggcactgctgtcc

SEQ ID NO: 1640 - RNA, 21 nt, synthetic construct
  source 1..21: mol_type = other RNA
ggagctggcagaactccgaga

SEQ ID NO: 1641 - RNA, 21 nt, synthetic construct
  source 1..21: mol_type = other RNA
ggaggcaagctggatctctct

SEQ ID NO: 1642 - RNA, 21 nt, synthetic construct
  source 1..21: mol_type = other RNA
ggaggccaccaccaccaccgc

SEQ ID NO: 1643 - RNA, 21 nt, synthetic construct
  source 1..21: mol_type = other RNA
ggaggggcccagggagagctg

SEQ ID NO: 1644 - RNA, 21 nt, synthetic construct
  source 1..21: mol_type = other RNA
ggaggtggtagtggtggcggt

SEQ ID NO: 1645 - RNA, 21 nt, synthetic construct
  source 1..21: mol_type = other RNA
ggagttctgccagctccttct

SEQ ID NO: 1646 - RNA, 21 nt, synthetic construct
  source 1..21: mol_type = other RNA
ggatatgggtaattgaagggc

SEQ ID NO: 1647 - RNA, 21 nt, synthetic construct
  source 1..21: mol_type = other RNA
ggatctctcttatagagtttc

SEQ ID NO: 1648 - RNA, 21 nt, synthetic construct
  source 1..21: mol_type = other RNA
ggatgtttcagctcttccacc

SEQ ID NO: 1649 - RNA, 21 nt, synthetic construct
  source 1..21: mol_type = other RNA
ggattgggcctggggatgttt

SEQ ID NO: 1650 - RNA, 21 nt, synthetic construct
  source 1..21: mol_type = other RNA
ggcaaccagaaccatgaaaaa

SEQ ID NO: 1651 - RNA, 21 nt, synthetic construct
  source 1..21: mol_type = other RNA
ggcaagctggatctctcttat

SEQ ID NO: 1652 - RNA, 21 nt, synthetic construct
  source 1..21: mol_type = other RNA
ggcacagaggttggacaggga

SEQ ID NO: 1653 - RNA, 21 nt, synthetic construct
  source 1..21: mol_type = other RNA
ggcacagcagtctgccggcag

SEQ ID NO: 1654 - RNA, 21 nt, synthetic construct
  source 1..21: mol_type = other RNA
ggcacagttcttccctgtcca

SEQ ID NO: 1655 - RNA, 21 nt, synthetic construct
  source 1..21: mol_type = other RNA
ggcactgctgtccacccagta

SEQ ID NO: 1656 - RNA, 21 nt, synthetic construct
  source 1..21: mol_type = other RNA
ggcagaactccgagaggtaag

SEQ ID NO: 1657 - RNA, 21 nt, synthetic construct
  source 1..21: mol_type = other RNA
ggcagactgctgtgccctgga

SEQ ID NO: 1658 - RNA, 21 nt, synthetic construct
  source 1..21: mol_type = other RNA
ggcagcggtagtggaggcagt

SEQ ID NO: 1659 - RNA, 21 nt, synthetic construct
  source 1..21: mol_type = other RNA
ggcagctggtgagtcaggcca

SEQ ID NO: 1660 - RNA, 21 nt, synthetic construct
  source 1..21: mol_type = other RNA
ggcaggcttacctctcggagt

SEQ ID NO: 1661 - RNA, 21 nt, synthetic construct
  source 1..21: mol_type = other RNA
ggccaccaccaccaccgccac

SEQ ID NO: 1662 - RNA, 21 nt, synthetic construct
  source 1..21: mol_type = other RNA
ggccagccccagcaaacggtt

SEQ ID NO: 1663 - RNA, 21 nt, synthetic construct
  source 1..21: mol_type = other RNA
ggcccaatcctaccaaggcaa

SEQ ID NO: 1664 - RNA, 21 nt, synthetic construct
  source 1..21: mol_type = other RNA
ggcccagggagagctggcact

SEQ ID NO: 1665 - RNA, 21 nt, synthetic construct
  source 1..21: mol_type = other RNA
ggcccctccaggcacagttct

SEQ ID NO: 1666 - RNA, 21 nt, synthetic construct
  source 1..21: mol_type = other RNA
ggcctcctttgaccaggcctt

SEQ ID NO: 1667 - RNA, 21 nt, synthetic construct
  source 1..21: mol_type = other RNA
ggcctgactcaccagctgcca

SEQ ID NO: 1668 - RNA, 21 nt, synthetic construct
  source 1..21: mol_type = other RNA
ggcctggggatgtttcagctc

SEQ ID NO: 1669 - RNA, 21 nt, synthetic construct
  source 1..21: mol_type = other RNA
ggcctggtcaaaggaggccac

SEQ ID NO: 1670 - RNA, 21 nt, synthetic construct
  source 1..21: mol_type = other RNA
ggcctgtgctgtggttccctc

SEQ ID NO: 1671 - RNA, 21 nt, synthetic construct
  source 1..21: mol_type = other RNA
ggcctgtgtctccttgtgatg

SEQ ID NO: 1672 - RNA, 21 nt, synthetic construct
  source 1..21: mol_type = other RNA
ggccttctgggcacagaggtt

SEQ ID NO: 1673 - RNA, 21 nt, synthetic construct
  source 1..21: mol_type = other RNA
ggcggaggtggtagtggtggc

SEQ ID NO: 1674 - RNA, 21 nt, synthetic construct
  source 1..21: mol_type = other RNA
ggcggcggaggtggtagtggt

SEQ ID NO: 1675 - RNA, 21 nt, synthetic construct
  source 1..21: mol_type = other RNA
ggcggcggcggaggtggtagt

SEQ ID NO: 1676 - RNA, 21 nt, synthetic construct
  source 1..21: mol_type = other RNA
ggcggtggcggtggtggtggt

SEQ ID NO: 1677 - RNA, 21 nt, synthetic construct
  source 1..21: mol_type = other RNA
ggcggtggtggtggtggcctc

SEQ ID NO: 1678 - RNA, 21 nt, synthetic construct
  source 1..21: mol_type = other RNA
ggctgaggtgtcaaggacggg

SEQ ID NO: 1679 - RNA, 21 nt, synthetic construct
  source 1..21: mol_type = other RNA
ggctgctgcatggcagctggt

SEQ ID NO: 1680 - RNA, 21 nt, synthetic construct
  source 1..21: mol_type = other RNA
ggctggcctgactcaccagct

SEQ ID NO: 1681 - RNA, 21 nt, synthetic construct
  source 1..21: mol_type = other RNA
ggcttacctctcggagttctg

SEQ ID NO: 1682 - RNA, 21 nt, synthetic construct
  source 1..21: mol_type = other RNA
gggaaccacagcacaggcctg

SEQ ID NO: 1683 - RNA, 21 nt, synthetic construct
  source 1..21: mol_type = other RNA
gggaagaactgtgcctggagg

SEQ ID NO: 1684 - RNA, 21 nt, synthetic construct
  source 1..21: mol_type = other RNA
gggaccctgttgctgactgct

SEQ ID NO: 1685 - RNA, 21 nt, synthetic construct
  source 1..21: mol_type = other RNA
gggagagctggcactgctgtc

SEQ ID NO: 1686 - RNA, 21 nt, synthetic construct
  source 1..21: mol_type = other RNA
gggatatgggtaattgaaggg

SEQ ID NO: 1687 - RNA, 21 nt, synthetic construct
  source 1..21: mol_type = other RNA
gggatgtttcagctcttccac

SEQ ID NO: 1688 - RNA, 21 nt, synthetic construct
  source 1..21: mol_type = other RNA
gggcacagaggttggacaggg

SEQ ID NO: 1689 - RNA, 21 nt, synthetic construct
  source 1..21: mol_type = other RNA
gggcacagcagtctgccggca

SEQ ID NO: 1690 - RNA, 21 nt, synthetic construct
  source 1..21: mol_type = other RNA
gggcccagggagagctggcac

SEQ ID NO: 1691 - RNA, 21 nt, synthetic construct
  source 1..21: mol_type = other RNA
gggcccctccaggcacagttc

SEQ ID NO: 1692 - RNA, 21 nt, synthetic construct
  source 1..21: mol_type = other RNA
gggcctggggatgtttcagct

SEQ ID NO: 1693 - RNA, 21 nt, synthetic construct
  source 1..21: mol_type = other RNA
gggctgctgcatggcagctgg

SEQ ID NO: 1694 - RNA, 21 nt, synthetic construct
  source 1..21: mol_type = other RNA
gggctggcctgactcaccagc

SEQ ID NO: 1695 - RNA, 21 nt, synthetic construct
  source 1..21: mol_type = other RNA
ggggatatgggtaattgaagg

SEQ ID NO: 1696 - RNA, 21 nt, synthetic construct
  source 1..21: mol_type = other RNA
ggggatgtttcagctcttcca

SEQ ID NO: 1697 - RNA, 21 nt, synthetic construct
  source 1..21: mol_type = other RNA
ggggcccagggagagctggca

SEQ ID NO: 1698 - RNA, 21 nt, synthetic construct
  source 1..21: mol_type = other RNA
ggggctggcctgactcaccag

SEQ ID NO: 1699 - RNA, 21 nt, synthetic construct
  source 1..21: mol_type = other RNA
ggggtggcagcggtagtggag

SEQ ID NO: 1700 - RNA, 21 nt, synthetic construct
  source 1..21: mol_type = other RNA
gggtaattgaagggctgctgc

SEQ ID NO: 1701 - RNA, 21 nt, synthetic construct
  source 1..21: mol_type = other RNA
gggtcccgtccttgacacctc

SEQ ID NO: 1702 - RNA, 21 nt, synthetic construct
  source 1..21: mol_type = other RNA
gggtggacagcagtgccagct

SEQ ID NO: 1703 - RNA, 21 nt, synthetic construct
  source 1..21: mol_type = other RNA
gggtggcagcggtagtggagg

SEQ ID NO: 1704 - RNA, 21 nt, synthetic construct
  source 1..21: mol_type = other RNA
ggtaagcctgccggcagactg

SEQ ID NO: 1705 - RNA, 21 nt, synthetic construct
  source 1..21: mol_type = other RNA
ggtaattgaagggctgctgca

SEQ ID NO: 1706 - RNA, 21 nt, synthetic construct
  source 1..21: mol_type = other RNA
ggtaggattgggcctggggat

SEQ ID NO: 1707 - RNA, 21 nt, synthetic construct
  source 1..21: mol_type = other RNA
ggtagtggaggcagtggtggc

SEQ ID NO: 1708 - RNA, 21 nt, synthetic construct
  source 1..21: mol_type = other RNA
ggtagtggtggcggtggcggt

SEQ ID NO: 1709 - RNA, 21 nt, synthetic construct
  source 1..21: mol_type = other RNA
ggtcaaaggaggccaccacca

SEQ ID NO: 1710 - RNA, 21 nt, synthetic construct
  source 1..21: mol_type = other RNA
ggtcccgtccttgacacctca

SEQ ID NO: 1711 - RNA, 21 nt, synthetic construct
  source 1..21: mol_type = other RNA
ggtgagtcaggccagccccag

SEQ ID NO: 1712 - RNA, 21 nt, synthetic construct
  source 1..21: mol_type = other RNA
ggtgcctccagggcacagcag

SEQ ID NO: 1713 - RNA, 21 nt, synthetic construct
  source 1..21: mol_type = other RNA
ggtggaagagctgaaacatcc

SEQ ID NO: 1714 - RNA, 21 nt, synthetic construct
  source 1..21: mol_type = other RNA
ggtggacagcagtgccagctc

SEQ ID NO: 1715 - RNA, 21 nt, synthetic construct
  source 1..21: mol_type = other RNA
ggtggcagcggtagtggaggc

SEQ ID NO: 1716 - RNA, 21 nt, synthetic construct
  source 1..21: mol_type = other RNA
ggtggcctcctttgaccaggc

SEQ ID NO: 1717 - RNA, 21 nt, synthetic construct
  source 1..21: mol_type = other RNA
ggtggcggtggcggtggtggt

SEQ ID NO: 1718 - RNA, 21 nt, synthetic construct
  source 1..21: mol_type = other RNA
ggtggcggtggtggtggtggc

SEQ ID NO: 1719 - RNA, 21 nt, synthetic construct
  source 1..21: mol_type = other RNA
ggtggtagtggtggcggtggc

SEQ ID NO: 1720 - RNA, 21 nt, synthetic construct
  source 1..21: mol_type = other RNA
ggtggtggcctcctttgacca

SEQ ID NO: 1721 - RNA, 21 nt, synthetic construct
  source 1..21: mol_type = other RNA
ggtggtggtggcctcctttga

SEQ ID NO: 1722 - RNA, 21 nt, synthetic construct
  source 1..21: mol_type = other RNA
ggtggtggtggtggcctcctt

SEQ ID NO: 1723 - RNA, 21 nt, synthetic construct
  source 1..21: mol_type = other RNA
ggtgtcaaggacgggaccctg

SEQ ID NO: 1724 - RNA, 21 nt, synthetic construct
  source 1..21: mol_type = other RNA
ggttccctctcttcttcaggg

SEQ ID NO: 1725 - RNA, 21 nt, synthetic construct
  source 1..21: mol_type = other RNA
ggttctggttgccttggtagg

SEQ ID NO: 1726 - RNA, 21 nt, synthetic construct
  source 1..21: mol_type = other RNA
ggttgccttggtaggattggg

SEQ ID NO: 1727 - RNA, 21 nt, synthetic construct
  source 1..21: mol_type = other RNA
ggttggacagggaagaactgt

SEQ ID NO: 1728 - RNA, 21 nt, synthetic construct
  source 1..21: mol_type = other RNA
ggttttacttcttctcagtcc

SEQ ID NO: 1729 - RNA, 21 nt, synthetic construct
  source 1..21: mol_type = other RNA
gtaaaaccgtttgctggggct

SEQ ID NO: 1730 - RNA, 21 nt, synthetic construct
  source 1..21: mol_type = other RNA
gtaagcctgccggcagactgc

SEQ ID NO: 1731 - RNA, 21 nt, synthetic construct
  source 1..21: mol_type = other RNA
gtaattgaagggctgctgcat

SEQ ID NO: 1732 - RNA, 21 nt, synthetic construct
  source 1..21: mol_type = other RNA
gtagaggctgaggtgtcaagg

SEQ ID NO: 1733 - RNA, 21 nt, synthetic construct
  source 1..21: mol_type = other RNA
gtagatctggggatatgggta

SEQ ID NO: 1734 - RNA, 21 nt, synthetic construct
  source 1..21: mol_type = other RNA
gtaggattgggcctggggatg

SEQ ID NO: 1735 - RNA, 21 nt, synthetic construct
  source 1..21: mol_type = other RNA
gtaggtggaagagctgaaaca

SEQ ID NO: 1736 - RNA, 21 nt, synthetic construct
  source 1..21: mol_type = other RNA
gtagtggaggcagtggtggcg

SEQ ID NO: 1737 - RNA, 21 nt, synthetic construct
  source 1..21: mol_type = other RNA
gtagtggtggcggtggcggtg

SEQ ID NO: 1738 - RNA, 21 nt, synthetic construct
  source 1..21: mol_type = other RNA
gtcaaaggaggccaccaccac

SEQ ID NO: 1739 - RNA, 21 nt, synthetic construct
  source 1..21: mol_type = other RNA
gtcaaggacgggaccctgttg

SEQ ID NO: 1740 - RNA, 21 nt, synthetic construct
  source 1..21: mol_type = other RNA
gtcagcaacagggtcccgtcc

SEQ ID NO: 1741 - RNA, 21 nt, synthetic construct
  source 1..21: mol_type = other RNA
gtcaggccagccccagcaaac

SEQ ID NO: 1742 - RNA, 21 nt, synthetic construct
  source 1..21: mol_type = other RNA
gtccaacctctgtgcccagaa

SEQ ID NO: 1743 - RNA, 21 nt, synthetic construct
  source 1..21: mol_type = other RNA
gtccacccagtagatctgggg

SEQ ID NO: 1744 - RNA, 21 nt, synthetic construct
  source 1..21: mol_type = other RNA
gtcccgtccttgacacctcag

SEQ ID NO: 1745 - RNA, 21 nt, synthetic construct
  source 1..21: mol_type = other RNA
gtcctgtagaggctgaggtgt

SEQ ID NO: 1746 - RNA, 21 nt, synthetic construct
  source 1..21: mol_type = other RNA
gtccttgacacctcagcctct

SEQ ID NO: 1747 - RNA, 21 nt, synthetic construct
  source 1..21: mol_type = other RNA
gtctccttgtgatgtttttca

SEQ ID NO: 1748 - RNA, 21 nt, synthetic construct
  source 1..21: mol_type = other RNA
gtctgccggcaggcttacctc

SEQ ID NO: 1749 - RNA, 21 nt, synthetic construct
  source 1..21: mol_type = other RNA
gtgagtcaggccagccccagc

SEQ ID NO: 1750 - RNA, 21 nt, synthetic construct
  source 1..21: mol_type = other RNA
gtgatgtttttcatggttctg

SEQ ID NO: 1751 - RNA, 21 nt, synthetic construct
  source 1..21: mol_type = other RNA
gtgccagctctccctgggccc

SEQ ID NO: 1752 - RNA, 21 nt, synthetic construct
  source 1..21: mol_type = other RNA
gtgcccagaaggcctggtcaa

SEQ ID NO: 1753 - RNA, 21 nt, synthetic construct
  source 1..21: mol_type = other RNA
gtgcctccagggcacagcagt

SEQ ID NO: 1754 - RNA, 21 nt, synthetic construct
  source 1..21: mol_type = other RNA
gtgcctggaggggcccaggga

SEQ ID NO: 1755 - RNA, 21 nt, synthetic construct
  source 1..21: mol_type = other RNA
gtgctgtggttccctctcttc

SEQ ID NO: 1756 - RNA, 21 nt, synthetic construct
  source 1..21: mol_type = other RNA
gtggaagagctgaaacatccc

SEQ ID NO: 1757 - RNA, 21 nt, synthetic construct
  source 1..21: mol_type = other RNA
gtggacagcagtgccagctct

SEQ ID NO: 1758 - RNA, 21 nt, synthetic construct
  source 1..21: mol_type = other RNA
gtggaggcagtggtggcggcg

SEQ ID NO: 1759 - RNA, 21 nt, synthetic construct
  source 1..21: mol_type = other RNA
gtggcagcggtagtggaggca

SEQ ID NO: 1760 - RNA, 21 nt, synthetic construct
  source 1..21: mol_type = other RNA
gtggcctcctttgaccaggcc

SEQ ID NO: 1761 - RNA, 21 nt, synthetic construct
  source 1..21: mol_type = other RNA
gtggcggtggcggtggtggtg

SEQ ID NO: 1762 - RNA, 21 nt, synthetic construct
  source 1..21: mol_type = other RNA
gtggcggtggtggtggtggcc

SEQ ID NO: 1763 - RNA, 21 nt, synthetic construct
  source 1..21: mol_type = other RNA
gtggtagtggtggcggtggcg

SEQ ID NO: 1764 - RNA, 21 nt, synthetic construct
  source 1..21: mol_type = other RNA
gtggtggcctcctttgaccag

SEQ ID NO: 1765 - RNA, 21 nt, synthetic construct
  source 1..21: mol_type = other RNA
gtggtggcggtggcggtggtg

SEQ ID NO: 1766 - RNA, 21 nt, synthetic construct
  source 1..21: mol_type = other RNA
gtggtggtggcctcctttgac

SEQ ID NO: 1767 - RNA, 21 nt, synthetic construct
  source 1..21: mol_type = other RNA
gtggtggtggtggcctccttt

SEQ ID NO: 1768 - RNA, 21 nt, synthetic construct
  source 1..21: mol_type = other RNA
gtggttccctctcttcttcag

SEQ ID NO: 1769 - RNA, 21 nt, synthetic construct
  source 1..21: mol_type = other RNA
gtgtcaaggacgggaccctgt

SEQ ID NO: 1770 - RNA, 21 nt, synthetic construct
  source 1..21: mol_type = other RNA
gtgtctccttgtgatgttttt

SEQ ID NO: 1771 - RNA, 21 nt, synthetic construct
  source 1..21: mol_type = other RNA
gttccctctcttcttcagggg

SEQ ID NO: 1772 - RNA, 21 nt, synthetic construct
  source 1..21: mol_type = other RNA
gttctgccagctccttctgta

SEQ ID NO: 1773 - RNA, 21 nt, synthetic construct
  source 1..21: mol_type = other RNA
gttctggttgccttggtagga

SEQ ID NO: 1774 - RNA, 21 nt, synthetic construct
  source 1..21: mol_type = other RNA
gttcttccctgtccaacctct

SEQ ID NO: 1775 - RNA, 21 nt, synthetic construct
  source 1..21: mol_type = other RNA
gttgccttggtaggattgggc

SEQ ID NO: 1776 - RNA, 21 nt, synthetic construct
  source 1..21: mol_type = other RNA
gttgctgactgctcaagagga

SEQ ID NO: 1777 - RNA, 21 nt, synthetic construct
  source 1..21: mol_type = other RNA
gttggacagggaagaactgtg

SEQ ID NO: 1778 - RNA, 21 nt, synthetic construct
  source 1..21: mol_type = other RNA
gtttcagctcttccacctaca

SEQ ID NO: 1779 - RNA, 21 nt, synthetic construct
  source 1..21: mol_type = other RNA
gtttgctggggctggcctgac

SEQ ID NO: 1780 - RNA, 21 nt, synthetic construct
  source 1..21: mol_type = other RNA
gttttacttcttctcagtcct

SEQ ID NO: 1781 - RNA, 21 nt, synthetic construct
  source 1..21: mol_type = other RNA
gtttttcatggttctggttgc

SEQ ID NO: 1782 - RNA, 21 nt, synthetic construct
  source 1..21: mol_type = other RNA
taaaaccgtttgctggggctg

SEQ ID NO: 1783 - RNA, 21 nt, synthetic construct
  source 1..21: mol_type = other RNA
taagagagatccagcttgcct

SEQ ID NO: 1784 - RNA, 21 nt, synthetic construct
  source 1..21: mol_type = other RNA
taagcctgccggcagactgct

SEQ ID NO: 1785 - RNA, 21 nt, synthetic construct
  source 1..21: mol_type = other RNA
taattgaagggctgctgcatg

SEQ ID NO: 1786 - RNA, 21 nt, synthetic construct
  source 1..21: mol_type = other RNA
tacagaaggagctggcagaac

SEQ ID NO: 1787 - RNA, 21 nt, synthetic construct
  source 1..21: mol_type = other RNA
tacaggactgagaagaagtaa

SEQ ID NO: 1788 - RNA, 21 nt, synthetic construct
  source 1..21: mol_type = other RNA
taccaaggcaaccagaaccat

SEQ ID NO: 1789 - RNA, 21 nt, synthetic construct
  source 1..21: mol_type = other RNA
tacccatatccccagatctac

SEQ ID NO: 1790 - RNA, 21 nt, synthetic construct
  source 1..21: mol_type = other RNA
taccgctgccacccctgaaga

SEQ ID NO: 1791 - RNA, 21 nt, synthetic construct
  source 1..21: mol_type = other RNA
tacctctcggagttctgccag

SEQ ID NO: 1792 - RNA, 21 nt, synthetic construct
  source 1..21: mol_type = other RNA
tactgggtggacagcagtgcc

SEQ ID NO: 1793 - RNA, 21 nt, synthetic construct
  source 1..21: mol_type = other RNA
tacttcttctcagtcctgtag

SEQ ID NO: 1794 - RNA, 21 nt, synthetic construct
  source 1..21: mol_type = other RNA
tagaggctgaggtgtcaagga

SEQ ID NO: 1795 - RNA, 21 nt, synthetic construct
  source 1..21: mol_type = other RNA
tagatctggggatatgggtaa

SEQ ID NO: 1796 - RNA, 21 nt, synthetic construct
  source 1..21: mol_type = other RNA
tagctatggaaactctataag

SEQ ID NO: 1797 - RNA, 21 nt, synthetic construct
  source 1..21: mol_type = other RNA
taggattgggcctggggatgt

SEQ ID NO: 1798 - RNA, 21 nt, synthetic construct
  source 1..21: mol_type = other RNA
taggtggaagagctgaaacat

SEQ ID NO: 1799 - RNA, 21 nt, synthetic construct
  source 1..21: mol_type = other RNA
tagtggaggcagtggtggcgg

SEQ ID NO: 1800 - RNA, 21 nt, synthetic construct
  source 1..21: mol_type = other RNA
tagtggtggcggtggcggtgg

SEQ ID NO: 1801 - RNA, 21 nt, synthetic construct
  source 1..21: mol_type = other RNA
tataagagagatccagcttgc

SEQ ID NO: 1802 - RNA, 21 nt, synthetic construct
  source 1..21: mol_type = other RNA
tatccccagatctactgggtg

SEQ ID NO: 1803 - RNA, 21 nt, synthetic construct
  source 1..21: mol_type = other RNA
tatgcctggtgcctccagggc

SEQ ID NO: 1804 - RNA, 21 nt, synthetic construct
  source 1..21: mol_type = other RNA
tatggaaactctataagagag

SEQ ID NO: 1805 - RNA, 21 nt, synthetic construct
  source 1..21: mol_type = other RNA
tatgggtaattgaagggctgc

SEQ ID NO: 1806 - RNA, 21 nt, synthetic construct
  source 1..21: mol_type = other RNA
tcaaaggaggccaccaccacc

SEQ ID NO: 1807 - RNA, 21 nt, synthetic construct
  source 1..21: mol_type = other RNA
tcaagaggaggcaagctggat

SEQ ID NO: 1808 - RNA, 21 nt, synthetic construct
  source 1..21: mol_type = other RNA
tcaaggacgggaccctgttgc

SEQ ID NO: 1809 - RNA, 21 nt, synthetic construct
  source 1..21: mol_type = other RNA
tcaattacccatatccccaga

SEQ ID NO: 1810 - RNA, 21 nt, synthetic construct
  source 1..21: mol_type = other RNA
tcacaaggagacacaggcctg

SEQ ID NO: 1811 - RNA, 21 nt, synthetic construct
  source 1..21: mol_type = other RNA
tcaccagctgccatgcagcag

SEQ ID NO: 1812 - RNA, 21 nt, synthetic construct
  source 1..21: mol_type = other RNA
tcagcaacagggtcccgtcct

SEQ ID NO: 1813 - RNA, 21 nt, synthetic construct
  source 1..21: mol_type = other RNA
tcagcctctacaggactgaga

SEQ ID NO: 1814 - RNA, 21 nt, synthetic construct
  source 1..21: mol_type = other RNA
tcagctcttccacctacagaa

SEQ ID NO: 1815 - RNA, 21 nt, synthetic construct
  source 1..21: mol_type = other RNA
tcaggccagccccagcaaacg

SEQ ID NO: 1816 - RNA, 21 nt, synthetic construct
  source 1..21: mol_type = other RNA
tcaggggtggcagcggtagtg

SEQ ID NO: 1817 - RNA, 21 nt, synthetic construct
  source 1..21: mol_type = other RNA
tcagtcctgtagaggctgagg

SEQ ID NO: 1818 - RNA, 21 nt, synthetic construct
  source 1..21: mol_type = other RNA
tcatggttctggttgccttgg

SEQ ID NO: 1819 - RNA, 21 nt, synthetic construct
  source 1..21: mol_type = other RNA
tccaacctctgtgcccagaag

SEQ ID NO: 1820 - RNA, 21 nt, synthetic construct
  source 1..21: mol_type = other RNA
tccacccagtagatctgggga

SEQ ID NO: 1821 - RNA, 21 nt, synthetic construct
  source 1..21: mol_type = other RNA
tccacctacagaaggagctgg

SEQ ID NO: 1822 - RNA, 21 nt, synthetic construct
  source 1..21: mol_type = other RNA
tccactaccgctgccacccct

SEQ ID NO: 1823 - RNA, 21 nt, synthetic construct
  source 1..21: mol_type = other RNA
tccagcttgcctcctcttgag

SEQ ID NO: 1824 - RNA, 21 nt, synthetic construct
  source 1..21: mol_type = other RNA
tccaggcacagttcttccctg

SEQ ID NO: 1825 - RNA, 21 nt, synthetic construct
  source 1..21: mol_type = other RNA
tccagggcacagcagtctgcc

SEQ ID NO: 1826 - RNA, 21 nt, synthetic construct
  source 1..21: mol_type = other RNA
tccccagatctactgggtgga

SEQ ID NO: 1827 - RNA, 21 nt, synthetic construct
  source 1..21: mol_type = other RNA
tccccaggcccaatcctacca

SEQ ID NO: 1828 - RNA, 21 nt, synthetic construct
  source 1..21: mol_type = other RNA
tcccgtccttgacacctcagc

SEQ ID NO: 1829 - RNA, 21 nt, synthetic construct
  source 1..21: mol_type = other RNA
tccctctcttcttcaggggtg

SEQ ID NO: 1830 - RNA, 21 nt, synthetic construct
  source 1..21: mol_type = other RNA
tccctgggcccctccaggcac

SEQ ID NO: 1831 - RNA, 21 nt, synthetic construct
  source 1..21: mol_type = other RNA
tccctgtccaacctctgtgcc

SEQ ID NO: 1832 - RNA, 21 nt, synthetic construct
  source 1..21: mol_type = other RNA
tccgagaggtaagcctgccgg

SEQ ID NO: 1833 - RNA, 21 nt, synthetic construct
  source 1..21: mol_type = other RNA
tcctaccaaggcaaccagaac

SEQ ID NO: 1834 - RNA, 21 nt, synthetic construct
  source 1..21: mol_type = other RNA
tcctcttgagcagtcagcaac

SEQ ID NO: 1835 - RNA, 21 nt, synthetic construct
  source 1..21: mol_type = other RNA
tcctgtagaggctgaggtgtc

SEQ ID NO: 1836 - RNA, 21 nt, synthetic construct
  source 1..21: mol_type = other RNA
tccttctgtaggtggaagagc

SEQ ID NO: 1837 - RNA, 21 nt, synthetic construct
  source 1..21: mol_type = other RNA
tccttgacacctcagcctcta

SEQ ID NO: 1838 - RNA, 21 nt, synthetic construct
  source 1..21: mol_type = other RNA
tccttgtgatgtttttcatgg

SEQ ID NO: 1839 - RNA, 21 nt, synthetic construct
  source 1..21: mol_type = other RNA
tcctttgaccaggccttctgg

SEQ ID NO: 1840 - RNA, 21 nt, synthetic construct
  source 1..21: mol_type = other RNA
tcggagttctgccagctcctt

SEQ ID NO: 1841 - RNA, 21 nt, synthetic construct
  source 1..21: mol_type = other RNA
tctacaggactgagaagaagt

SEQ ID NO: 1842 - RNA, 21 nt, synthetic construct
  source 1..21: mol_type = other RNA
tctactgggtggacagcagtg

SEQ ID NO: 1843 - RNA, 21 nt, synthetic construct
  source 1..21: mol_type = other RNA
tctataagagagatccagctt

SEQ ID NO: 1844 - RNA, 21 nt, synthetic construct
  source 1..21: mol_type = other RNA
tctcagtcctgtagaggctga

SEQ ID NO: 1845 - RNA, 21 nt, synthetic construct
  source 1..21: mol_type = other RNA
tctccctgggcccctccaggc

SEQ ID NO: 1846 - RNA, 21 nt, synthetic construct
  source 1..21: mol_type = other RNA
tctccttgtgatgtttttcat

SEQ ID NO: 1847 - RNA, 21 nt, synthetic construct
  source 1..21: mol_type = other RNA
tctcggagttctgccagctcc

SEQ ID NO: 1848 - RNA, 21 nt, synthetic construct
  source 1..21: mol_type = other RNA
tctcttcttcaggggtggcag

SEQ ID NO: 1849 - RNA, 21 nt, synthetic construct
  source 1..21: mol_type = other RNA
tctgccagctccttctgtagg

SEQ ID NO: 1850 - RNA, 21 nt, synthetic construct
  source 1..21: mol_type = other RNA
tctgccggcaggcttacctct

SEQ ID NO: 1851 - RNA, 21 nt, synthetic construct
  source 1..21: mol_type = other RNA
tctgggcacagaggttggaca

SEQ ID NO: 1852 - RNA, 21 nt, synthetic construct
  source 1..21: mol_type = other RNA
tctggggatatgggtaattga

SEQ ID NO: 1853 - RNA, 21 nt, synthetic construct
  source 1..21: mol_type = other RNA
tctggttgccttggtaggatt

SEQ ID NO: 1854 - RNA, 21 nt, synthetic construct
  source 1..21: mol_type = other RNA
tctgtaggtggaagagctgaa

SEQ ID NO: 1855 - RNA, 21 nt, synthetic construct
  source 1..21: mol_type = other RNA
tctgtgcccagaaggcctggt

SEQ ID NO: 1856 - RNA, 21 nt, synthetic construct
  source 1..21: mol_type = other RNA
tcttcaggggtggcagcggta

SEQ ID NO: 1857 - RNA, 21 nt, synthetic construct
  source 1..21: mol_type = other RNA
tcttccacctacagaaggagc

SEQ ID NO: 1858 - RNA, 21 nt, synthetic construct
  source 1..21: mol_type = other RNA
tcttccctgtccaacctctgt

SEQ ID NO: 1859 - RNA, 21 nt, synthetic construct
  source 1..21: mol_type = other RNA
tcttctcagtcctgtagaggc

SEQ ID NO: 1860 - RNA, 21 nt, synthetic construct
  source 1..21: mol_type = other RNA
tcttcttcaggggtggcagcg

SEQ ID NO: 1861 - RNA, 21 nt, synthetic construct
  source 1..21: mol_type = other RNA
tcttgagcagtcagcaacagg

SEQ ID NO: 1862 - RNA, 21 nt, synthetic construct
  source 1..21: mol_type = other RNA
tgaaaaacatcacaaggagac

SEQ ID NO: 1863 - RNA, 21 nt, synthetic construct
  source 1..21: mol_type = other RNA
tgaaacatccccaggcccaat

SEQ ID NO: 1864 - RNA, 21 nt, synthetic construct
  source 1..21: mol_type = other RNA
tgaagaagagagggaaccaca

SEQ ID NO: 1865 - RNA, 21 nt, synthetic construct
  source 1..21: mol_type = other RNA
tgaagggctgctgcatggcag

SEQ ID NO: 1866 - RNA, 21 nt, synthetic construct
  source 1..21: mol_type = other RNA
tgacacctcagcctctacagg

SEQ ID NO: 1867 - RNA, 21 nt, synthetic construct
  source 1..21: mol_type = other RNA
tgaccaggccttctgggcaca

SEQ ID NO: 1868 - RNA, 21 nt, synthetic construct
  source 1..21: mol_type = other RNA
tgactcaccagctgccatgca

SEQ ID NO: 1869 - RNA, 21 nt, synthetic construct
  source 1..21: mol_type = other RNA
tgactgctcaagaggaggcaa

SEQ ID NO: 1870 - RNA, 21 nt, synthetic construct
  source 1..21: mol_type = other RNA
tgagaagaagtaaaaccgttt

SEQ ID NO: 1871 - RNA, 21 nt, synthetic construct
  source 1..21: mol_type = other RNA
tgagcagtcagcaacagggtc

SEQ ID NO: 1872 - RNA, 21 nt, synthetic construct
  source 1..21: mol_type = other RNA
tgaggtgtcaaggacgggacc

SEQ ID NO: 1873 - RNA, 21 nt, synthetic construct
  source 1..21: mol_type = other RNA
tgagtcaggccagccccagca

SEQ ID NO: 1874 - RNA, 21 nt, synthetic construct
  source 1..21: mol_type = other RNA
tgatgtttttcatggttctgg

SEQ ID NO: 1875 - RNA, 21 nt, synthetic construct
  source 1..21: mol_type = other RNA
tgcagcagcccttcaattacc

SEQ ID NO: 1876 - RNA, 21 nt, synthetic construct
  source 1..21: mol_type = other RNA
tgcatggcagctggtgagtca

SEQ ID NO: 1877 - RNA, 21 nt, synthetic construct
  source 1..21: mol_type = other RNA
tgccacccctgaagaagagag

SEQ ID NO: 1878 - RNA, 21 nt, synthetic construct
  source 1..21: mol_type = other RNA
tgccagctccttctgtaggtg

SEQ ID NO: 1879 - RNA, 21 nt, synthetic construct
  source 1..21: mol_type = other RNA
tgccagctctccctgggcccc

SEQ ID NO: 1880 - RNA, 21 nt, synthetic construct
  source 1..21: mol_type = other RNA
tgccatgcagcagcccttcaa

SEQ ID NO: 1881 - RNA, 21 nt, synthetic construct
  source 1..21: mol_type = other RNA
tgcccagaaggcctggtcaaa

SEQ ID NO: 1882 - RNA, 21 nt, synthetic construct
  source 1..21: mol_type = other RNA
tgccggcagactgctgtgccc

SEQ ID NO: 1883 - RNA, 21 nt, synthetic construct
  source 1..21: mol_type = other RNA
tgccggcaggcttacctctcg

SEQ ID NO: 1884 - RNA, 21 nt, synthetic construct
  source 1..21: mol_type = other RNA
tgcctccactaccgctgccac

SEQ ID NO: 1885 - RNA, 21 nt, synthetic construct
  source 1..21: mol_type = other RNA
tgcctccagggcacagcagtc

SEQ ID NO: 1886 - RNA, 21 nt, synthetic construct
  source 1..21: mol_type = other RNA
tgcctcctcttgagcagtcag

SEQ ID NO: 1887 - RNA, 21 nt, synthetic construct
  source 1..21: mol_type = other RNA
tgcctggaggggcccagggag

SEQ ID NO: 1888 - RNA, 21 nt, synthetic construct
  source 1..21: mol_type = other RNA
tgcctggtgcctccagggcac

SEQ ID NO: 1889 - RNA, 21 nt, synthetic construct
  source 1..21: mol_type = other RNA
tgccttggtaggattgggcct

SEQ ID NO: 1890 - RNA, 21 nt, synthetic construct
  source 1..21: mol_type = other RNA
tgctcaagaggaggcaagctg

SEQ ID NO: 1891 - RNA, 21 nt, synthetic construct
  source 1..21: mol_type = other RNA
tgctgactgctcaagaggagg

SEQ ID NO: 1892 - RNA, 21 nt, synthetic construct
  source 1..21: mol_type = other RNA
tgctgcatggcagctggtgag

SEQ ID NO: 1893 - RNA, 21 nt, synthetic construct
  source 1..21: mol_type = other RNA
tgctggggctggcctgactca

SEQ ID NO: 1894 - RNA, 21 nt, synthetic construct
  source 1..21: mol_type = other RNA
tgctgtccacccagtagatct

SEQ ID NO: 1895 - RNA, 21 nt, synthetic construct
  source 1..21: mol_type = other RNA
tgctgtggttccctctcttct

SEQ ID NO: 1896 - RNA, 21 nt, synthetic construct
  source 1..21: mol_type = other RNA
tggaaactctataagagagat

SEQ ID NO: 1897 - RNA, 21 nt, synthetic construct
  source 1..21: mol_type = other RNA
tggaagagctgaaacatcccc

SEQ ID NO: 1898 - RNA, 21 nt, synthetic construct
  source 1..21: mol_type = other RNA
tggacagcagtgccagctctc

SEQ ID NO: 1899 - RNA, 21 nt, synthetic construct
  source 1..21: mol_type = other RNA
tggacagggaagaactgtgcc

SEQ ID NO: 1900 - RNA, 21 nt, synthetic construct
  source 1..21: mol_type = other RNA
tggaggcagtggtggcggcgg

SEQ ID NO: 1901 - RNA, 21 nt, synthetic construct
  source 1..21: mol_type = other RNA
tggaggggcccagggagagct

SEQ ID NO: 1902 - RNA, 21 nt, synthetic construct
  source 1..21: mol_type = other RNA
tggatctctcttatagagttt

SEQ ID NO: 1903 - RNA, 21 nt, synthetic construct
  source 1..21: mol_type = other RNA
tggcactgctgtccacccagt

SEQ ID NO: 1904 - RNA, 21 nt, synthetic construct
  source 1..21: mol_type = other RNA
tggcagaactccgagaggtaa

SEQ ID NO: 1905 - RNA, 21 nt, synthetic construct
  source 1..21: mol_type = other RNA
tggcagcggtagtggaggcag

SEQ ID NO: 1906 - RNA, 21 nt, synthetic construct
  source 1..21: mol_type = other RNA
tggcagctggtgagtcaggcc

SEQ ID NO: 1907 - RNA, 21 nt, synthetic construct
  source 1..21: mol_type = other RNA
tggcctcctttgaccaggcct

SEQ ID NO: 1908 - RNA, 21 nt, synthetic construct
  source 1..21: mol_type = other RNA
tggcctgactcaccagctgcc

SEQ ID NO: 1909 - RNA, 21 nt, synthetic construct
  source 1..21: mol_type = other RNA
tggcggtggcggtggtggtgg

SEQ ID NO: 1910 - RNA, 21 nt, synthetic construct
  source 1..21: mol_type = other RNA
tggcggtggtggtggtggcct

SEQ ID NO: 1911 - RNA, 21 nt, synthetic construct
  source 1..21: mol_type = other RNA
tgggcacagaggttggacagg

SEQ ID NO: 1912 - RNA, 21 nt, synthetic construct
  source 1..21: mol_type = other RNA
tgggcccctccaggcacagtt

SEQ ID NO: 1913 - RNA, 21 nt, synthetic construct
  source 1..21: mol_type = other RNA
tgggcctggggatgtttcagc

SEQ ID NO: 1914 - RNA, 21 nt, synthetic construct
  source 1..21: mol_type = other RNA
tggggatatgggtaattgaag

SEQ ID NO: 1915 - RNA, 21 nt, synthetic construct
  source 1..21: mol_type = other RNA
tggggatgtttcagctcttcc

SEQ ID NO: 1916 - RNA, 21 nt, synthetic construct
  source 1..21: mol_type = other RNA
tggggctggcctgactcacca

SEQ ID NO: 1917 - RNA, 21 nt, synthetic construct
  source 1..21: mol_type = other RNA
tgggtaattgaagggctgctg

SEQ ID NO: 1918 - RNA, 21 nt, synthetic construct
  source 1..21: mol_type = other RNA
tgggtggacagcagtgccagc

SEQ ID NO: 1919 - RNA, 21 nt, synthetic construct
  source 1..21: mol_type = other RNA
tggtaggattgggcctgggga

SEQ ID NO: 1920 - RNA, 21 nt, synthetic construct
  source 1..21: mol_type = other RNA
tggtagtggtggcggtggcgg

SEQ ID NO: 1921 - RNA, 21 nt, synthetic construct
  source 1..21: mol_type = other RNA
tggtcaaaggaggccaccacc

SEQ ID NO: 1922 - RNA, 21 nt, synthetic construct
  source 1..21: mol_type = other RNA
tggtgagtcaggccagcccca

SEQ ID NO: 1923 - RNA, 21 nt, synthetic construct
  source 1..21: mol_type = other RNA
tggtgcctccagggcacagca

SEQ ID NO: 1924 - RNA, 21 nt, synthetic construct
  source 1..21: mol_type = other RNA
tggtggcctcctttgaccagg

SEQ ID NO: 1925 - RNA, 21 nt, synthetic construct
  source 1..21: mol_type = other RNA
tggtggcggtggcggtggtgg

SEQ ID NO: 1926 - RNA, 21 nt, synthetic construct
  source 1..21: mol_type = other RNA
tggtggtggcctcctttgacc

SEQ ID NO: 1927 - RNA, 21 nt, synthetic construct
  source 1..21: mol_type = other RNA
tggtggtggtggcctcctttg

SEQ ID NO: 1928 - RNA, 21 nt, synthetic construct
  source 1..21: mol_type = other RNA
tggttccctctcttcttcagg

SEQ ID NO: 1929 - RNA, 21 nt, synthetic construct
  source 1..21: mol_type = other RNA
tggttctggttgccttggtag

SEQ ID NO: 1930 - RNA, 21 nt, synthetic construct
  source 1..21: mol_type = other RNA
tggttgccttggtaggattgg

SEQ ID NO: 1931 - RNA, 21 nt, synthetic construct
  source 1..21: mol_type = other RNA
tgtagaggctgaggtgtcaag

SEQ ID NO: 1932 - RNA, 21 nt, synthetic construct
  source 1..21: mol_type = other RNA
tgtaggtggaagagctgaaac

SEQ ID NO: 1933 - RNA, 21 nt, synthetic construct
  source 1..21: mol_type = other RNA
tgtcaaggacgggaccctgtt

SEQ ID NO: 1934 - RNA, 21 nt, synthetic construct
  source 1..21: mol_type = other RNA
tgtccaacctctgtgcccaga

SEQ ID NO: 1935 - RNA, 21 nt, synthetic construct
  source 1..21: mol_type = other RNA
tgtccacccagtagatctggg

SEQ ID NO: 1936 - RNA, 21 nt, synthetic construct
  source 1..21: mol_type = other RNA
tgtctccttgtgatgtttttc

SEQ ID NO: 1937 - RNA, 21 nt, synthetic construct
  source 1..21: mol_type = other RNA
tgtgatgtttttcatggttct

SEQ ID NO: 1938 - RNA, 21 nt, synthetic construct
  source 1..21: mol_type = other RNA
tgtgcccagaaggcctggtca

SEQ ID NO: 1939 - RNA, 21 nt, synthetic construct
  source 1..21: mol_type = other RNA
tgtgcctggaggggcccaggg

SEQ ID NO: 1940 - RNA, 21 nt, synthetic construct
  source 1..21: mol_type = other RNA
tgtgctgtggttccctctctt

SEQ ID NO: 1941 - RNA, 21 nt, synthetic construct
  source 1..21: mol_type = other RNA
tgtggttccctctcttcttca

SEQ ID NO: 1942 - RNA, 21 nt, synthetic construct
  source 1..21: mol_type = other RNA
tgtgtctccttgtgatgtttt

SEQ ID NO: 1943 - RNA, 21 nt, synthetic construct
  source 1..21: mol_type = other RNA
tgttgctgactgctcaagagg

SEQ ID NO: 1944 - RNA, 21 nt, synthetic construct
  source 1..21: mol_type = other RNA
tgtttcagctcttccacctac

SEQ ID NO: 1945 - RNA, 21 nt, synthetic construct
  source 1..21: mol_type = other RNA
tgtttttcatggttctggttg

SEQ ID NO: 1946 - RNA, 21 nt, synthetic construct
  source 1..21: mol_type = other RNA
ttacccatatccccagatcta

SEQ ID NO: 1947 - RNA, 21 nt, synthetic construct
  source 1..21: mol_type = other RNA
ttacctctcggagttctgcca

SEQ ID NO: 1948 - RNA, 21 nt, synthetic construct
  source 1..21: mol_type = other RNA
ttacttcttctcagtcctgta

SEQ ID NO: 1949 - RNA, 21 nt, synthetic construct
  source 1..21: mol_type = other RNA
ttagctatggaaactctataa

SEQ ID NO: 1950 - RNA, 21 nt, synthetic construct
  source 1..21: mol_type = other RNA
ttcaattacccatatccccag

SEQ ID NO: 1951 - RNA, 21 nt, synthetic construct
  source 1..21: mol_type = other RNA
ttcagctcttccacctacaga

SEQ ID NO: 1952 - RNA, 21 nt, synthetic construct
  source 1..21: mol_type = other RNA
ttcaggggtggcagcggtagt

SEQ ID NO: 1953 - RNA, 21 nt, synthetic construct
  source 1..21: mol_type = other RNA
ttcatggttctggttgccttg

SEQ ID NO: 1954 - RNA, 21 nt, synthetic construct
  source 1..21: mol_type = other RNA
ttccacctacagaaggagctg

SEQ ID NO: 1955 - RNA, 21 nt, synthetic construct
  source 1..21: mol_type = other RNA
ttccctctcttcttcaggggt

SEQ ID NO: 1956 - RNA, 21 nt, synthetic construct
  source 1..21: mol_type = other RNA
ttccctgtccaacctctgtgc

SEQ ID NO: 1957 - RNA, 21 nt, synthetic construct
  source 1..21: mol_type = other RNA
ttctcagtcctgtagaggctg

SEQ ID NO: 1958 - RNA, 21 nt, synthetic construct
  source 1..21: mol_type = other RNA
ttctgccagctccttctgtag

SEQ ID NO: 1959 - RNA, 21 nt, synthetic construct
  source 1..21: mol_type = other RNA
ttctgggcacagaggttggac

SEQ ID NO: 1960 - RNA, 21 nt, synthetic construct
  source 1..21: mol_type = other RNA
ttctggttgccttggtaggat

SEQ ID NO: 1961 - RNA, 21 nt, synthetic construct
  source 1..21: mol_type = other RNA
ttctgtaggtggaagagctga

SEQ ID NO: 1962 - RNA, 21 nt, synthetic construct
  source 1..21: mol_type = other RNA
ttcttcaggggtggcagcggt

SEQ ID NO: 1963 - RNA, 21 nt, synthetic construct
  source 1..21: mol_type = other RNA
ttcttccctgtccaacctctg

SEQ ID NO: 1964 - RNA, 21 nt, synthetic construct
  source 1..21: mol_type = other RNA
ttcttctcagtcctgtagagg

SEQ ID NO: 1965 - RNA, 21 nt, synthetic construct
  source 1..21: mol_type = other RNA
ttgaagggctgctgcatggca

SEQ ID NO: 1966 - RNA, 21 nt, synthetic construct
  source 1..21: mol_type = other RNA
ttgacacctcagcctctacag

SEQ ID NO: 1967 - RNA, 21 nt, synthetic construct
  source 1..21: mol_type = other RNA
ttgaccaggccttctgggcac

SEQ ID NO: 1968 - RNA, 21 nt, synthetic construct
  source 1..21: mol_type = other RNA
ttgagcagtcagcaacagggt

SEQ ID NO: 1969 - RNA, 21 nt, synthetic construct
  source 1..21: mol_type = other RNA
ttgcctcctcttgagcagtca

SEQ ID NO: 1970 - RNA, 21 nt, synthetic construct
  source 1..21: mol_type = other RNA
ttgccttggtaggattgggcc

SEQ ID NO: 1971 - RNA, 21 nt, synthetic construct
  source 1..21: mol_type = other RNA
ttgctgactgctcaagaggag

SEQ ID NO: 1972 - RNA, 21 nt, synthetic construct
  source 1..21: mol_type = other RNA
ttgctggggctggcctgactc

SEQ ID NO: 1973 - RNA, 21 nt, synthetic construct
  source 1..21: mol_type = other RNA
ttggacagggaagaactgtgc

SEQ ID NO: 1974 - RNA, 21 nt, synthetic construct
  source 1..21: mol_type = other RNA
ttgggcctggggatgtttcag

SEQ ID NO: 1975 - RNA, 21 nt, synthetic construct
  source 1..21: mol_type = other RNA
ttggtaggattgggcctgggg

SEQ ID NO: 1976 - RNA, 21 nt, synthetic construct
  source 1..21: mol_type = other RNA
ttgtgatgtttttcatggttc

SEQ ID NO: 1977 - RNA, 21 nt, synthetic construct
  source 1..21: mol_type = other RNA
tttacttcttctcagtcctgt

SEQ ID NO: 1978 - RNA, 21 nt, synthetic construct
  source 1..21: mol_type = other RNA
tttcagctcttccacctacag

SEQ ID NO: 1979 - RNA, 21 nt, synthetic construct
  source 1..21: mol_type = other RNA
tttcatggttctggttgcctt

SEQ ID NO: 1980 - RNA, 21 nt, synthetic construct
  source 1..21: mol_type = other RNA
tttgaccaggccttctgggca

SEQ ID NO: 1981 - RNA, 21 nt, synthetic construct
  source 1..21: mol_type = other RNA
tttgctggggctggcctgact

SEQ ID NO: 1982 - RNA, 21 nt, synthetic construct
  source 1..21: mol_type = other RNA
ttttacttcttctcagtcctg

SEQ ID NO: 1983 - RNA, 21 nt, synthetic construct
  source 1..21: mol_type = other RNA
ttttcatggttctggttgcct

SEQ ID NO: 1984 - RNA, 21 nt, synthetic construct
  source 1..21: mol_type = other RNA
tttttcatggttctggttgcc

SEQ ID NO: 1985 - RNA, 22 nt, synthetic construct
  source 1..22: mol_type = other RNA
aaaaacatcacaaggagacaca

SEQ ID NO: 1986 - RNA, 22 nt, synthetic construct
  source 1..22: mol_type = other RNA
aaaacatcacaaggagacacag

SEQ ID NO: 1987 - RNA, 22 nt, synthetic construct
  source 1..22: mol_type = other RNA
aaaaccgtttgctggggctggc

SEQ ID NO: 1988 - RNA, 22 nt, synthetic construct
  source 1..22: mol_type = other RNA
aaacatcacaaggagacacagg

SEQ ID NO: 1989 - RNA, 22 nt, synthetic construct
  source 1..22: mol_type = other RNA
aaacatccccaggcccaatcct

SEQ ID NO: 1990 - RNA, 22 nt, synthetic construct
  source 1..22: mol_type = other RNA
aaaccgtttgctggggctggcc

SEQ ID NO: 1991 - RNA, 22 nt, synthetic construct
  source 1..22: mol_type = other RNA
aaacggttttacttcttctcag

SEQ ID NO: 1992 - RNA, 22 nt, synthetic construct
  source 1..22: mol_type = other RNA
aaactctataagagagatccag

SEQ ID NO: 1993 - RNA, 22 nt, synthetic construct
  source 1..22: mol_type = other RNA
aaaggaggccaccaccaccacc

SEQ ID NO: 1994 - RNA, 22 nt, synthetic construct
  source 1..22: mol_type = other RNA
aacagggtcccgtccttgacac

SEQ ID NO: 1995 - RNA, 22 nt, synthetic construct
  source 1..22: mol_type = other RNA
aacatcacaaggagacacaggc

SEQ ID NO: 1996 - RNA, 22 nt, synthetic construct
  source 1..22: mol_type = other RNA
aacatccccaggcccaatccta

SEQ ID NO: 1997 - RNA, 22 nt, synthetic construct
  source 1..22: mol_type = other RNA
aaccacagcacaggcctgtgtc

SEQ ID NO: 1998 - RNA, 22 nt, synthetic construct
  source 1..22: mol_type = other RNA
aaccagaaccatgaaaaacatc

SEQ ID NO: 1999 - RNA, 22 nt, synthetic construct
  source 1..22: mol_type = other RNA
aaccatgaaaaacatcacaagg

SEQ ID NO: 2000 - RNA, 22 nt, synthetic construct
  source 1..22: mol_type = other RNA
aaccgtttgctggggctggcct

SEQ ID NO: 2001 - RNA, 22 nt, synthetic construct
  source 1..22: mol_type = other RNA
aacctctgtgcccagaaggcct

SEQ ID NO: 2002 - RNA, 22 nt, synthetic construct
  source 1..22: mol_type = other RNA
aacggttttacttcttctcagt

SEQ ID NO: 2003 - RNA, 22 nt, synthetic construct
  source 1..22: mol_type = other RNA
aactccgagaggtaagcctgcc

SEQ ID NO: 2004 - RNA, 22 nt, synthetic construct
  source 1..22: mol_type = other RNA
aactctataagagagatccagc

SEQ ID NO: 2005 - RNA, 22 nt, synthetic construct
  source 1..22: mol_type = other RNA
aactgtgcctggaggggcccag

SEQ ID NO: 2006 - RNA, 22 nt, synthetic construct
  source 1..22: mol_type = other RNA
aagaactgtgcctggaggggcc

SEQ ID NO: 2007 - RNA, 22 nt, synthetic construct
  source 1..22: mol_type = other RNA
aagaagagagggaaccacagca

SEQ ID NO: 2008 - RNA, 22 nt, synthetic construct
  source 1..22: mol_type = other RNA
aagaagtaaaaccgtttgctgg

SEQ ID NO: 2009 - RNA, 22 nt, synthetic construct
  source 1..22: mol_type = other RNA
aagagagatccagcttgcctcc

SEQ ID NO: 2010 - RNA, 22 nt, synthetic construct
  source 1..22: mol_type = other RNA
aagagagggaaccacagcacag

SEQ ID NO: 2011 - RNA, 22 nt, synthetic construct
  source 1..22: mol_type = other RNA
aagagctgaaacatccccaggc

SEQ ID NO: 2012 - RNA, 22 nt, synthetic construct
  source 1..22: mol_type = other RNA
aagaggaggcaagctggatctc

SEQ ID NO: 2013 - RNA, 22 nt, synthetic construct
  source 1..22: mol_type = other RNA
aagcctgccggcagactgctgt

SEQ ID NO: 2014 - RNA, 22 nt, synthetic construct
  source 1..22: mol_type = other RNA
aagctggatctctcttatagag

SEQ ID NO: 2015 - RNA, 22 nt, synthetic construct
  source 1..22: mol_type = other RNA
aaggacgggaccctgttgctga

SEQ ID NO: 2016 - RNA, 22 nt, synthetic construct
  source 1..22: mol_type = other RNA
aaggagacacaggcctgtgctg

SEQ ID NO: 2017 - RNA, 22 nt, synthetic construct
  source 1..22: mol_type = other RNA
aaggagctggcagaactccgag

SEQ ID NO: 2018 - RNA, 22 nt, synthetic construct
  source 1..22: mol_type = other RNA
aaggaggccaccaccaccaccg

SEQ ID NO: 2019 - RNA, 22 nt, synthetic construct
  source 1..22: mol_type = other RNA
aaggcaaccagaaccatgaaaa

SEQ ID NO: 2020 - RNA, 22 nt, synthetic construct
  source 1..22: mol_type = other RNA
aaggcctggtcaaaggaggcca

SEQ ID NO: 2021 - RNA, 22 nt, synthetic construct
  source 1..22: mol_type = other RNA
aagggctgctgcatggcagctg

SEQ ID NO: 2022 - RNA, 22 nt, synthetic construct
  source 1..22: mol_type = other RNA
aagtaaaaccgtttgctggggc

SEQ ID NO: 2023 - RNA, 22 nt, synthetic construct
  source 1..22: mol_type = other RNA
aatcctaccaaggcaaccagaa

SEQ ID NO: 2024 - RNA, 22 nt, synthetic construct
  source 1..22: mol_type = other RNA
aattacccatatccccagatct

SEQ ID NO: 2025 - RNA, 22 nt, synthetic construct
  source 1..22: mol_type = other RNA
aattgaagggctgctgcatggc

SEQ ID NO: 2026 - RNA, 22 nt, synthetic construct
  source 1..22: mol_type = other RNA
acaaggagacacaggcctgtgc

SEQ ID NO: 2027 - RNA, 22 nt, synthetic construct
  source 1..22: mol_type = other RNA
acacaggcctgtgctgtggttc

SEQ ID NO: 2028 - RNA, 22 nt, synthetic construct
  source 1..22: mol_type = other RNA
acacctcagcctctacaggact

SEQ ID NO: 2029 - RNA, 22 nt, synthetic construct
  source 1..22: mol_type = other RNA
acagaaggagctggcagaactc

SEQ ID NO: 2030 - RNA, 22 nt, synthetic construct
  source 1..22: mol_type = other RNA
acagaggttggacagggaagaa

SEQ ID NO: 2031 - RNA, 22 nt, synthetic construct
  source 1..22: mol_type = other RNA
acagcacaggcctgtgtctcct

SEQ ID NO: 2032 - RNA, 22 nt, synthetic construct
  source 1..22: mol_type = other RNA
acagcagtctgccggcaggctt

SEQ ID NO: 2033 - RNA, 22 nt, synthetic construct
  source 1..22: mol_type = other RNA
acagcagtgccagctctccctg

SEQ ID NO: 2034 - RNA, 22 nt, synthetic construct
  source 1..22: mol_type = other RNA
acaggactgagaagaagtaaaa

SEQ ID NO: 2035 - RNA, 22 nt, synthetic construct
  source 1..22: mol_type = other RNA
acaggcctgtgctgtggttccc

SEQ ID NO: 2036 - RNA, 22 nt, synthetic construct
  source 1..22: mol_type = other RNA
acaggcctgtgtctccttgtga

SEQ ID NO: 2037 - RNA, 22 nt, synthetic construct
  source 1..22: mol_type = other RNA
acagggaagaactgtgcctgga

SEQ ID NO: 2038 - RNA, 22 nt, synthetic construct
  source 1..22: mol_type = other RNA
acagggtcccgtccttgacacc

SEQ ID NO: 2039 - RNA, 22 nt, synthetic construct
  source 1..22: mol_type = other RNA
acagttcttccctgtccaacct

SEQ ID NO: 2040 - RNA, 22 nt, synthetic construct
  source 1..22: mol_type = other RNA
acatcacaaggagacacaggcc

SEQ ID NO: 2041 - RNA, 22 nt, synthetic construct
  source 1..22: mol_type = other RNA
acatccccaggcccaatcctac

SEQ ID NO: 2042 - RNA, 22 nt, synthetic construct
  source 1..22: mol_type = other RNA
accaaggcaaccagaaccatga

SEQ ID NO: 2043 - RNA, 22 nt, synthetic construct
  source 1..22: mol_type = other RNA
accacagcacaggcctgtgtct

SEQ ID NO: 2044 - RNA, 22 nt, synthetic construct
  source 1..22: mol_type = other RNA
accaccaccaccgccaccgcca

SEQ ID NO: 2045 - RNA, 22 nt, synthetic construct
  source 1..22: mol_type = other RNA
accaccaccgccaccgccacca

SEQ ID NO: 2046 - RNA, 22 nt, synthetic construct
  source 1..22: mol_type = other RNA
accaccgccaccgccaccacta

SEQ ID NO: 2047 - RNA, 22 nt, synthetic construct
  source 1..22: mol_type = other RNA
accactaccacctccgccgccg

SEQ ID NO: 2048 - RNA, 22 nt, synthetic construct
  source 1..22: mol_type = other RNA
accactgcctccactaccgctg

SEQ ID NO: 2049 - RNA, 22 nt, synthetic construct
  source 1..22: mol_type = other RNA
accagaaccatgaaaaacatca

SEQ ID NO: 2050 - RNA, 22 nt, synthetic construct
  source 1..22: mol_type = other RNA
accagctgccatgcagcagccc

SEQ ID NO: 2051 - RNA, 22 nt, synthetic construct
  source 1..22: mol_type = other RNA
accaggccttctgggcacagag

SEQ ID NO: 2052 - RNA, 22 nt, synthetic construct
  source 1..22: mol_type = other RNA
accatgaaaaacatcacaagga

SEQ ID NO: 2053 - RNA, 22 nt, synthetic construct
  source 1..22: mol_type = other RNA
acccagtagatctggggatatg

SEQ ID NO: 2054 - RNA, 22 nt, synthetic construct
  source 1..22: mol_type = other RNA
acccatatccccagatctactg

SEQ ID NO: 2055 - RNA, 22 nt, synthetic construct
  source 1..22: mol_type = other RNA
acccctgaagaagagagggaac

SEQ ID NO: 2056 - RNA, 22 nt, synthetic construct
  source 1..22: mol_type = other RNA
accctgttgctgactgctcaag

SEQ ID NO: 2057 - RNA, 22 nt, synthetic construct
  source 1..22: mol_type = other RNA
accgccaccactaccacctccg

SEQ ID NO: 2058 - RNA, 22 nt, synthetic construct
  source 1..22: mol_type = other RNA
accgccaccgccaccactacca

SEQ ID NO: 2059 - RNA, 22 nt, synthetic construct
  source 1..22: mol_type = other RNA
accgctgccacccctgaagaag

SEQ ID NO: 2060 - RNA, 22 nt, synthetic construct
  source 1..22: mol_type = other RNA
accgtttgctggggctggcctg

SEQ ID NO: 2061 - RNA, 22 nt, synthetic construct
  source 1..22: mol_type = other RNA
acctacagaaggagctggcaga

SEQ ID NO: 2062 - RNA, 22 nt, synthetic construct
  source 1..22: mol_type = other RNA
acctcagcctctacaggactga

SEQ ID NO: 2063 - RNA, 22 nt, synthetic construct
  source 1..22: mol_type = other RNA
acctctcggagttctgccagct

SEQ ID NO: 2064 - RNA, 22 nt, synthetic construct
  source 1..22: mol_type = other RNA
acctctgtgcccagaaggcctg

SEQ ID NO: 2065 - RNA, 22 nt, synthetic construct
  source 1..22: mol_type = other RNA
acgggaccctgttgctgactgc

SEQ ID NO: 2066 - RNA, 22 nt, synthetic construct
  source 1..22: mol_type = other RNA
acggttttacttcttctcagtc

SEQ ID NO: 2067 - RNA, 22 nt, synthetic construct
  source 1..22: mol_type = other RNA
actaccacctccgccgccgccg

SEQ ID NO: 2068 - RNA, 22 nt, synthetic construct
  source 1..22: mol_type = other RNA
actaccgctgccacccctgaag

SEQ ID NO: 2069 - RNA, 22 nt, synthetic construct
  source 1..22: mol_type = other RNA
actcaccagctgccatgcagca

SEQ ID NO: 2070 - RNA, 22 nt, synthetic construct
  source 1..22: mol_type = other RNA
actccgagaggtaagcctgccg

SEQ ID NO: 2071 - RNA, 22 nt, synthetic construct
  source 1..22: mol_type = other RNA
actctataagagagatccagct

SEQ ID NO: 2072 - RNA, 22 nt, synthetic construct
  source 1..22: mol_type = other RNA
actgagaagaagtaaaaccgtt

SEQ ID NO: 2073 - RNA, 22 nt, synthetic construct
  source 1..22: mol_type = other RNA
actgcctccactaccgctgcca

SEQ ID NO: 2074 - RNA, 22 nt, synthetic construct
  source 1..22: mol_type = other RNA
actgctcaagaggaggcaagct

SEQ ID NO: 2075 - RNA, 22 nt, synthetic construct
  source 1..22: mol_type = other RNA
actgctgtccacccagtagatc

SEQ ID NO: 2076 - RNA, 22 nt, synthetic construct
  source 1..22: mol_type = other RNA
actgggtggacagcagtgccag

SEQ ID NO: 2077 - RNA, 22 nt, synthetic construct
  source 1..22: mol_type = other RNA
actgtgcctggaggggcccagg

SEQ ID NO: 2078 - RNA, 22 nt, synthetic construct
  source 1..22: mol_type = other RNA
acttcttctcagtcctgtagag

SEQ ID NO: 2079 - RNA, 22 nt, synthetic construct
  source 1..22: mol_type = other RNA
agaaccatgaaaaacatcacaa

SEQ ID NO: 2080 - RNA, 22 nt, synthetic construct
  source 1..22: mol_type = other RNA
agaactccgagaggtaagcctg

SEQ ID NO: 2081 - RNA, 22 nt, synthetic construct
  source 1..22: mol_type = other RNA
agaactgtgcctggaggggccc

SEQ ID NO: 2082 - RNA, 22 nt, synthetic construct
  source 1..22: mol_type = other RNA
agaagaagtaaaaccgtttgct

SEQ ID NO: 2083 - RNA, 22 nt, synthetic construct
  source 1..22: mol_type = other RNA
agaagagagggaaccacagcac

SEQ ID NO: 2084 - RNA, 22 nt, synthetic construct
  source 1..22: mol_type = other RNA
agaaggagctggcagaactccg

SEQ ID NO: 2085 - RNA, 22 nt, synthetic construct
  source 1..22: mol_type = other RNA
agaaggcctggtcaaaggaggc

SEQ ID NO: 2086 - RNA, 22 nt, synthetic construct
  source 1..22: mol_type = other RNA
agaagtaaaaccgtttgctggg

SEQ ID NO: 2087 - RNA, 22 nt, synthetic construct
  source 1..22: mol_type = other RNA
agacacaggcctgtgctgtggt

SEQ ID NO: 2088 - RNA, 22 nt, synthetic construct
  source 1..22: mol_type = other RNA
agactgctgtgccctggaggca

SEQ ID NO: 2089 - RNA, 22 nt, synthetic construct
  source 1..22: mol_type = other RNA
agagagatccagcttgcctcct

SEQ ID NO: 2090 - RNA, 22 nt, synthetic construct
  source 1..22: mol_type = other RNA
agagagggaaccacagcacagg

SEQ ID NO: 2091 - RNA, 22 nt, synthetic construct
  source 1..22: mol_type = other RNA
agagatccagcttgcctcctct

SEQ ID NO: 2092 - RNA, 22 nt, synthetic construct
  source 1..22: mol_type = other RNA
agagctgaaacatccccaggcc

SEQ ID NO: 2093 - RNA, 22 nt, synthetic construct
  source 1..22: mol_type = other RNA
agagctggcactgctgtccacc

SEQ ID NO: 2094 - RNA, 22 nt, synthetic construct
  source 1..22: mol_type = other RNA
agaggaggcaagctggatctct

SEQ ID NO: 2095 - RNA, 22 nt, synthetic construct
  source 1..22: mol_type = other RNA
agaggctgaggtgtcaaggacg

SEQ ID NO: 2096 - RNA, 22 nt, synthetic construct
  source 1..22: mol_type = other RNA
agagggaaccacagcacaggcc

SEQ ID NO: 2097 - RNA, 22 nt, synthetic construct
  source 1..22: mol_type = other RNA
agaggtaagcctgccggcagac

SEQ ID NO: 2098 - RNA, 22 nt, synthetic construct
  source 1..22: mol_type = other RNA
agaggttggacagggaagaact

SEQ ID NO: 2099 - RNA, 22 nt, synthetic construct
  source 1..22: mol_type = other RNA
agatccagcttgcctcctcttg

SEQ ID NO: 2100 - RNA, 22 nt, synthetic construct
  source 1..22: mol_type = other RNA
agatctactgggtggacagcag

SEQ ID NO: 2101 - RNA, 22 nt, synthetic construct
  source 1..22: mol_type = other RNA
agatctggggatatgggtaatt

SEQ ID NO: 2102 - RNA, 22 nt, synthetic construct
  source 1..22: mol_type = other RNA
agcaaacggttttacttcttct

SEQ ID NO: 2103 - RNA, 22 nt, synthetic construct
  source 1..22: mol_type = other RNA
agcaacagggtcccgtccttga

SEQ ID NO: 2104 - RNA, 22 nt, synthetic construct
  source 1..22: mol_type = other RNA
agcacaggcctgtgtctccttg

SEQ ID NO: 2105 - RNA, 22 nt, synthetic construct
  source 1..22: mol_type = other RNA
agcagcccttcaattacccata

SEQ ID NO: 2106 - RNA, 22 nt, synthetic construct
  source 1..22: mol_type = other RNA
agcagtcagcaacagggtcccg

SEQ ID NO: 2107 - RNA, 22 nt, synthetic construct
  source 1..22: mol_type = other RNA
agcagtctgccggcaggcttac

SEQ ID NO: 2108 - RNA, 22 nt, synthetic construct
  source 1..22: mol_type = other RNA
agcagtgccagctctccctggg

SEQ ID NO: 2109 - RNA, 22 nt, synthetic construct
  source 1..22: mol_type = other RNA
agccccagcaaacggttttact

SEQ ID NO: 2110 - RNA, 22 nt, synthetic construct
  source 1..22: mol_type = other RNA
agcccttcaattacccatatcc

SEQ ID NO: 2111 - RNA, 22 nt, synthetic construct
  source 1..22: mol_type = other RNA
agcctctacaggactgagaaga

SEQ ID NO: 2112 - RNA, 22 nt, synthetic construct
  source 1..22: mol_type = other RNA
agcctgccggcagactgctgtg

SEQ ID NO: 2113 - RNA, 22 nt, synthetic construct
  source 1..22: mol_type = other RNA
agcggtagtggaggcagtggtg

SEQ ID NO: 2114 - RNA, 22 nt, synthetic construct
  source 1..22: mol_type = other RNA
agctatggaaactctataagag

SEQ ID NO: 2115 - RNA, 22 nt, synthetic construct
  source 1..22: mol_type = other RNA
agctccttctgtaggtggaaga

SEQ ID NO: 2116 - RNA, 22 nt, synthetic construct
  source 1..22: mol_type = other RNA
agctctccctgggcccctccag

SEQ ID NO: 2117 - RNA, 22 nt, synthetic construct
  source 1..22: mol_type = other RNA
agctcttccacctacagaagga

SEQ ID NO: 2118 - RNA, 22 nt, synthetic construct
  source 1..22: mol_type = other RNA
agctgaaacatccccaggccca

SEQ ID NO: 2119 - RNA, 22 nt, synthetic construct
  source 1..22: mol_type = other RNA
agctgccatgcagcagcccttc

SEQ ID NO: 2120 - RNA, 22 nt, synthetic construct
  source 1..22: mol_type = other RNA
agctggatctctcttatagagt

SEQ ID NO: 2121 - RNA, 22 nt, synthetic construct
  source 1..22: mol_type = other RNA
agctggcactgctgtccaccca

SEQ ID NO: 2122 - RNA, 22 nt, synthetic construct
  source 1..22: mol_type = other RNA
agctggcagaactccgagaggt

SEQ ID NO: 2123 - RNA, 22 nt, synthetic construct
  source 1..22: mol_type = other RNA
agctggtgagtcaggccagccc

SEQ ID NO: 2124 - RNA, 22 nt, synthetic construct
  source 1..22: mol_type = other RNA
agcttgcctcctcttgagcagt

SEQ ID NO: 2125 - RNA, 22 nt, synthetic construct
  source 1..22: mol_type = other RNA
aggacgggaccctgttgctgac

SEQ ID NO: 2126 - RNA, 22 nt, synthetic construct
  source 1..22: mol_type = other RNA
aggactgagaagaagtaaaacc

SEQ ID NO: 2127 - RNA, 22 nt, synthetic construct
  source 1..22: mol_type = other RNA
aggagacacaggcctgtgctgt

SEQ ID NO: 2128 - RNA, 22 nt, synthetic construct
  source 1..22: mol_type = other RNA
aggagctggcagaactccgaga

SEQ ID NO: 2129 - RNA, 22 nt, synthetic construct
  source 1..22: mol_type = other RNA
aggaggcaagctggatctctct

SEQ ID NO: 2130 - RNA, 22 nt, synthetic construct
  source 1..22: mol_type = other RNA
aggaggccaccaccaccaccgc

SEQ ID NO: 2131 - RNA, 22 nt, synthetic construct
  source 1..22: mol_type = other RNA
aggattgggcctggggatgttt

SEQ ID NO: 2132 - RNA, 22 nt, synthetic construct
  source 1..22: mol_type = other RNA
aggcaaccagaaccatgaaaaa

SEQ ID NO: 2133 - RNA, 22 nt, synthetic construct
  source 1..22: mol_type = other RNA
aggcaagctggatctctcttat

SEQ ID NO: 2134 - RNA, 22 nt, synthetic construct
  source 1..22: mol_type = other RNA
aggcacagttcttccctgtcca

SEQ ID NO: 2135 - RNA, 22 nt, synthetic construct
  source 1..22: mol_type = other RNA
aggccaccaccaccaccgccac

SEQ ID NO: 2136 - RNA, 22 nt, synthetic construct
  source 1..22: mol_type = other RNA
aggccagccccagcaaacggtt

SEQ ID NO: 2137 - RNA, 22 nt, synthetic construct
  source 1..22: mol_type = other RNA
aggcccaatcctaccaaggcaa

SEQ ID NO: 2138 - RNA, 22 nt, synthetic construct
  source 1..22: mol_type = other RNA
aggcctggtcaaaggaggccac

SEQ ID NO: 2139 - RNA, 22 nt, synthetic construct
  source 1..22: mol_type = other RNA
aggcctgtgctgtggttccctc

SEQ ID NO: 2140 - RNA, 22 nt, synthetic construct
  source 1..22: mol_type = other RNA
aggcctgtgtctccttgtgatg

SEQ ID NO: 2141 - RNA, 22 nt, synthetic construct
  source 1..22: mol_type = other RNA
aggccttctgggcacagaggtt

SEQ ID NO: 2142 - RNA, 22 nt, synthetic construct
  source 1..22: mol_type = other RNA
aggctgaggtgtcaaggacggg

SEQ ID NO: 2143 - RNA, 22 nt, synthetic construct
  source 1..22: mol_type = other RNA
aggcttacctctcggagttctg

SEQ ID NO: 2144 - RNA, 22 nt, synthetic construct
  source 1..22: mol_type = other RNA
agggaaccacagcacaggcctg

SEQ ID NO: 2145 - RNA, 22 nt, synthetic construct
  source 1..22: mol_type = other RNA
agggaagaactgtgcctggagg

SEQ ID NO: 2146 - RNA, 22 nt, synthetic construct
  source 1..22: mol_type = other RNA
agggagagctggcactgctgtc

SEQ ID NO: 2147 - RNA, 22 nt, synthetic construct
  source 1..22: mol_type = other RNA
agggcacagcagtctgccggca

SEQ ID NO: 2148 - RNA, 22 nt, synthetic construct
  source 1..22: mol_type = other RNA
agggctgctgcatggcagctgg

SEQ ID NO: 2149 - RNA, 22 nt, synthetic construct
  source 1..22: mol_type = other RNA
aggggcccagggagagctggca

SEQ ID NO: 2150 - RNA, 22 nt, synthetic construct
  source 1..22: mol_type = other RNA
aggggtggcagcggtagtggag

SEQ ID NO: 2151 - RNA, 22 nt, synthetic construct
  source 1..22: mol_type = other RNA
agggtcccgtccttgacacctc

SEQ ID NO: 2152 - RNA, 22 nt, synthetic construct
  source 1..22: mol_type = other RNA
aggtaagcctgccggcagactg

SEQ ID NO: 2153 - RNA, 22 nt, synthetic construct
  source 1..22: mol_type = other RNA
aggtggaagagctgaaacatcc

SEQ ID NO: 2154 - RNA, 22 nt, synthetic construct
  source 1..22: mol_type = other RNA
aggtggtagtggtggcggtggc

SEQ ID NO: 2155 - RNA, 22 nt, synthetic construct
  source 1..22: mol_type = other RNA
aggtgtcaaggacgggaccctg

SEQ ID NO: 2156 - RNA, 22 nt, synthetic construct
  source 1..22: mol_type = other RNA
aggttggacagggaagaactgt

SEQ ID NO: 2157 - RNA, 22 nt, synthetic construct
  source 1..22: mol_type = other RNA
agtaaaaccgtttgctggggct

SEQ ID NO: 2158 - RNA, 22 nt, synthetic construct
  source 1..22: mol_type = other RNA
agtagatctggggatatgggta

SEQ ID NO: 2159 - RNA, 22 nt, synthetic construct
  source 1..22: mol_type = other RNA
agtcagcaacagggtcccgtcc

SEQ ID NO: 2160 - RNA, 22 nt, synthetic construct
  source 1..22: mol_type = other RNA
agtcaggccagccccagcaaac

SEQ ID NO: 2161 - RNA, 22 nt, synthetic construct
  source 1..22: mol_type = other RNA
agtcctgtagaggctgaggtgt

SEQ ID NO: 2162 - RNA, 22 nt, synthetic construct
  source 1..22: mol_type = other RNA
agtctgccggcaggcttacctc

SEQ ID NO: 2163 - RNA, 22 nt, synthetic construct
  source 1..22: mol_type = other RNA
agtgccagctctccctgggccc

SEQ ID NO: 2164 - RNA, 22 nt, synthetic construct
  source 1..22: mol_type = other RNA
agtggaggcagtggtggcggcg

SEQ ID NO: 2165 - RNA, 22 nt, synthetic construct
  source 1..22: mol_type = other RNA
agtggtggcggtggcggtggtg

SEQ ID NO: 2166 - RNA, 22 nt, synthetic construct
  source 1..22: mol_type = other RNA
agttctgccagctccttctgta

SEQ ID NO: 2167 - RNA, 22 nt, synthetic construct
  source 1..22: mol_type = other RNA
agttcttccctgtccaacctct

SEQ ID NO: 2168 - RNA, 22 nt, synthetic construct
  source 1..22: mol_type = other RNA
ataagagagatccagcttgcct

SEQ ID NO: 2169 - RNA, 22 nt, synthetic construct
  source 1..22: mol_type = other RNA
atatccccagatctactgggtg

SEQ ID NO: 2170 - RNA, 22 nt, synthetic construct
  source 1..22: mol_type = other RNA
atatgggtaattgaagggctgc

SEQ ID NO: 2171 - RNA, 22 nt, synthetic construct
  source 1..22: mol_type = other RNA
atcacaaggagacacaggcctg

SEQ ID NO: 2172 - RNA, 22 nt, synthetic construct
  source 1..22: mol_type = other RNA
atccagcttgcctcctcttgag

SEQ ID NO: 2173 - RNA, 22 nt, synthetic construct
  source 1..22: mol_type = other RNA
atccccagatctactgggtgga

SEQ ID NO: 2174 - RNA, 22 nt, synthetic construct
  source 1..22: mol_type = other RNA
atccccaggcccaatcctacca

SEQ ID NO: 2175 - RNA, 22 nt, synthetic construct
  source 1..22: mol_type = other RNA
atcctaccaaggcaaccagaac

SEQ ID NO: 2176 - RNA, 22 nt, synthetic construct
  source 1..22: mol_type = other RNA
atctactgggtggacagcagtg

SEQ ID NO: 2177 - RNA, 22 nt, synthetic construct
  source 1..22: mol_type = other RNA
atctggggatatgggtaattga

SEQ ID NO: 2178 - RNA, 22 nt, synthetic construct
  source 1..22: mol_type = other RNA
atgaaaaacatcacaaggagac

SEQ ID NO: 2179 - RNA, 22 nt, synthetic construct
  source 1..22: mol_type = other RNA
atgcagcagcccttcaattacc

SEQ ID NO: 2180 - RNA, 22 nt, synthetic construct
  source 1..22: mol_type = other RNA
atgcctggtgcctccagggcac

SEQ ID NO: 2181 - RNA, 22 nt, synthetic construct
  source 1..22: mol_type = other RNA
atggaaactctataagagagat

SEQ ID NO: 2182 - RNA, 22 nt, synthetic construct
  source 1..22: mol_type = other RNA
atggcagctggtgagtcaggcc

SEQ ID NO: 2183 - RNA, 22 nt, synthetic construct
  source 1..22: mol_type = other RNA
atgggtaattgaagggctgctg

SEQ ID NO: 2184 - RNA, 22 nt, synthetic construct
  source 1..22: mol_type = other RNA
atggttctggttgccttggtag

SEQ ID NO: 2185 - RNA, 22 nt, synthetic construct
  source 1..22: mol_type = other RNA
atgtttcagctcttccacctac

SEQ ID NO: 2186 - RNA, 22 nt, synthetic construct
  source 1..22: mol_type = other RNA
atgtttttcatggttctggttg

SEQ ID NO: 2187 - RNA, 22 nt, synthetic construct
  source 1..22: mol_type = other RNA
attacccatatccccagatcta

SEQ ID NO: 2188 - RNA, 22 nt, synthetic construct
  source 1..22: mol_type = other RNA
attgaagggctgctgcatggca

SEQ ID NO: 2189 - RNA, 22 nt, synthetic construct
  source 1..22: mol_type = other RNA
attgggcctggggatgtttcag

SEQ ID NO: 2190 - RNA, 22 nt, synthetic construct
  source 1..22: mol_type = other RNA
caaacggttttacttcttctca

SEQ ID NO: 2191 - RNA, 22 nt, synthetic construct
  source 1..22: mol_type = other RNA
caaaggaggccaccaccaccac

SEQ ID NO: 2192 - RNA, 22 nt, synthetic construct
  source 1..22: mol_type = other RNA
caacagggtcccgtccttgaca

SEQ ID NO: 2193 - RNA, 22 nt, synthetic construct
  source 1..22: mol_type = other RNA
caaccagaaccatgaaaaacat

SEQ ID NO: 2194 - RNA, 22 nt, synthetic construct
  source 1..22: mol_type = other RNA
caacctctgtgcccagaaggcc

SEQ ID NO: 2195 - RNA, 22 nt, synthetic construct
  source 1..22: mol_type = other RNA
caagaggaggcaagctggatct

SEQ ID NO: 2196 - RNA, 22 nt, synthetic construct
  source 1..22: mol_type = other RNA
caagctggatctctcttataga

SEQ ID NO: 2197 - RNA, 22 nt, synthetic construct
  source 1..22: mol_type = other RNA
caaggacgggaccctgttgctg

SEQ ID NO: 2198 - RNA, 22 nt, synthetic construct
  source 1..22: mol_type = other RNA
caaggagacacaggcctgtgct

SEQ ID NO: 2199 - RNA, 22 nt, synthetic construct
  source 1..22: mol_type = other RNA
caaggcaaccagaaccatgaaa

SEQ ID NO: 2200 - RNA, 22 nt, synthetic construct
  source 1..22: mol_type = other RNA
caatcctaccaaggcaaccaga

SEQ ID NO: 2201 - RNA, 22 nt, synthetic construct
  source 1..22: mol_type = other RNA
caattacccatatccccagatc

SEQ ID NO: 2202 - RNA, 22 nt, synthetic construct
  source 1..22: mol_type = other RNA
cacaaggagacacaggcctgtg

SEQ ID NO: 2203 - RNA, 22 nt, synthetic construct
  source 1..22: mol_type = other RNA
cacagaggttggacagggaaga

SEQ ID NO: 2204 - RNA, 22 nt, synthetic construct
  source 1..22: mol_type = other RNA
cacagcacaggcctgtgtctcc

SEQ ID NO: 2205 - RNA, 22 nt, synthetic construct
  source 1..22: mol_type = other RNA
cacagcagtctgccggcaggct

SEQ ID NO: 2206 - RNA, 22 nt, synthetic construct
  source 1..22: mol_type = other RNA
cacaggcctgtgctgtggttcc

SEQ ID NO: 2207 - RNA, 22 nt, synthetic construct
  source 1..22: mol_type = other RNA
cacaggcctgtgtctccttgtg

SEQ ID NO: 2208 - RNA, 22 nt, synthetic construct
  source 1..22: mol_type = other RNA
cacagttcttccctgtccaacc

SEQ ID NO: 2209 - RNA, 22 nt, synthetic construct
  source 1..22: mol_type = other RNA
caccaccaccaccgccaccgcc

SEQ ID NO: 2210 - RNA, 22 nt, synthetic construct
  source 1..22: mol_type = other RNA
caccaccaccgccaccgccacc

SEQ ID NO: 2211 - RNA, 22 nt, synthetic construct
  source 1..22: mol_type = other RNA
caccaccgccaccgccaccact

SEQ ID NO: 2212 - RNA, 22 nt, synthetic construct
  source 1..22: mol_type = other RNA
caccactaccacctccgccgcc

SEQ ID NO: 2213 - RNA, 22 nt, synthetic construct
  source 1..22: mol_type = other RNA
caccactgcctccactaccgct

SEQ ID NO: 2214 - RNA, 22 nt, synthetic construct
  source 1..22: mol_type = other RNA
caccagctgccatgcagcagcc

SEQ ID NO: 2215 - RNA, 22 nt, synthetic construct
  source 1..22: mol_type = other RNA
cacccagtagatctggggatat

SEQ ID NO: 2216 - RNA, 22 nt, synthetic construct
  source 1..22: mol_type = other RNA
cacccctgaagaagagagggaa

SEQ ID NO: 2217 - RNA, 22 nt, synthetic construct
  source 1..22: mol_type = other RNA
caccgccaccactaccacctcc

SEQ ID NO: 2218 - RNA, 22 nt, synthetic construct
  source 1..22: mol_type = other RNA
caccgccaccgccaccactacc

SEQ ID NO: 2219 - RNA, 22 nt, synthetic construct
  source 1..22: mol_type = other RNA
cacctacagaaggagctggcag

SEQ ID NO: 2220 - RNA, 22 nt, synthetic construct
  source 1..22: mol_type = other RNA
cacctcagcctctacaggactg

SEQ ID NO: 2221 - RNA, 22 nt, synthetic construct
  source 1..22: mol_type = other RNA
cactaccacctccgccgccgcc

SEQ ID NO: 2222 - RNA, 22 nt, synthetic construct
  source 1..22: mol_type = other RNA
cactaccgctgccacccctgaa

SEQ ID NO: 2223 - RNA, 22 nt, synthetic construct
  source 1..22: mol_type = other RNA
cactgcctccactaccgctgcc

SEQ ID NO: 2224 - RNA, 22 nt, synthetic construct
  source 1..22: mol_type = other RNA
cactgctgtccacccagtagat

SEQ ID NO: 2225 - RNA, 22 nt, synthetic construct
  source 1..22: mol_type = other RNA
cagaaccatgaaaaacatcaca

SEQ ID NO: 2226 - RNA, 22 nt, synthetic construct
  source 1..22: mol_type = other RNA
cagaactccgagaggtaagcct

SEQ ID NO: 2227 - RNA, 22 nt, synthetic construct
  source 1..22: mol_type = other RNA
cagaaggagctggcagaactcc

SEQ ID NO: 2228 - RNA, 22 nt, synthetic construct
  source 1..22: mol_type = other RNA
cagaaggcctggtcaaaggagg

SEQ ID NO: 2229 - RNA, 22 nt, synthetic construct
  source 1..22: mol_type = other RNA
cagactgctgtgccctggaggc

SEQ ID NO: 2230 - RNA, 22 nt, synthetic construct
  source 1..22: mol_type = other RNA
cagaggttggacagggaagaac

SEQ ID NO: 2231 - RNA, 22 nt, synthetic construct
  source 1..22: mol_type = other RNA
cagatctactgggtggacagca

SEQ ID NO: 2232 - RNA, 22 nt, synthetic construct
  source 1..22: mol_type = other RNA
cagcaaacggttttacttcttc

SEQ ID NO: 2233 - RNA, 22 nt, synthetic construct
  source 1..22: mol_type = other RNA
cagcaacagggtcccgtccttg

SEQ ID NO: 2234 - RNA, 22 nt, synthetic construct
  source 1..22: mol_type = other RNA
cagcacaggcctgtgtctcctt

SEQ ID NO: 2235 - RNA, 22 nt, synthetic construct
  source 1..22: mol_type = other RNA
cagcagcccttcaattacccat

SEQ ID NO: 2236 - RNA, 22 nt, synthetic construct
  source 1..22: mol_type = other RNA
cagcagtctgccggcaggctta

SEQ ID NO: 2237 - RNA, 22 nt, synthetic construct
  source 1..22: mol_type = other RNA
cagcagtgccagctctccctgg

SEQ ID NO: 2238 - RNA, 22 nt, synthetic construct
  source 1..22: mol_type = other RNA
cagccccagcaaacggttttac

SEQ ID NO: 2239 - RNA, 22 nt, synthetic construct
  source 1..22: mol_type = other RNA
cagcccttcaattacccatatc

SEQ ID NO: 2240 - RNA, 22 nt, synthetic construct
  source 1..22: mol_type = other RNA
cagcctctacaggactgagaag

SEQ ID NO: 2241 - RNA, 22 nt, synthetic construct
  source 1..22: mol_type = other RNA
cagcggtagtggaggcagtggt

SEQ ID NO: 2242 - RNA, 22 nt, synthetic construct
  source 1..22: mol_type = other RNA
cagctccttctgtaggtggaag

SEQ ID NO: 2243 - RNA, 22 nt, synthetic construct
  source 1..22: mol_type = other RNA
cagctctccctgggcccctcca

SEQ ID NO: 2244 - RNA, 22 nt, synthetic construct
  source 1..22: mol_type = other RNA
cagctcttccacctacagaagg

SEQ ID NO: 2245 - RNA, 22 nt, synthetic construct
  source 1..22: mol_type = other RNA
cagctgccatgcagcagccctt

SEQ ID NO: 2246 - RNA, 22 nt, synthetic construct
  source 1..22: mol_type = other RNA
cagctggtgagtcaggccagcc

SEQ ID NO: 2247 - RNA, 22 nt, synthetic construct
  source 1..22: mol_type = other RNA
cagcttgcctcctcttgagcag

SEQ ID NO: 2248 - RNA, 22 nt, synthetic construct
  source 1..22: mol_type = other RNA
caggactgagaagaagtaaaac

SEQ ID NO: 2249 - RNA, 22 nt, synthetic construct
  source 1..22: mol_type = other RNA
caggcacagttcttccctgtcc

SEQ ID NO: 2250 - RNA, 22 nt, synthetic construct
  source 1..22: mol_type = other RNA
caggccagccccagcaaacggt

SEQ ID NO: 2251 - RNA, 22 nt, synthetic construct
  source 1..22: mol_type = other RNA
caggcccaatcctaccaaggca

SEQ ID NO: 2252 - RNA, 22 nt, synthetic construct
  source 1..22: mol_type = other RNA
caggcctgtgctgtggttccct

SEQ ID NO: 2253 - RNA, 22 nt, synthetic construct
  source 1..22: mol_type = other RNA
caggcctgtgtctccttgtgat

SEQ ID NO: 2254 - RNA, 22 nt, synthetic construct
  source 1..22: mol_type = other RNA
caggccttctgggcacagaggt

SEQ ID NO: 2255 - RNA, 22 nt, synthetic construct
  source 1..22: mol_type = other RNA
caggcttacctctcggagttct

SEQ ID NO: 2256 - RNA, 22 nt, synthetic construct
  source 1..22: mol_type = other RNA
cagggaagaactgtgcctggag

SEQ ID NO: 2257 - RNA, 22 nt, synthetic construct
  source 1..22: mol_type = other RNA
cagggagagctggcactgctgt

SEQ ID NO: 2258 - RNA, 22 nt, synthetic construct
  source 1..22: mol_type = other RNA
cagggcacagcagtctgccggc

SEQ ID NO: 2259 - RNA, 22 nt, synthetic construct
  source 1..22: mol_type = other RNA
caggggtggcagcggtagtgga

SEQ ID NO: 2260 - RNA, 22 nt, synthetic construct
  source 1..22: mol_type = other RNA
cagggtcccgtccttgacacct

SEQ ID NO: 2261 - RNA, 22 nt, synthetic construct
  source 1..22: mol_type = other RNA
cagtagatctggggatatgggt

SEQ ID NO: 2262 - RNA, 22 nt, synthetic construct
  source 1..22: mol_type = other RNA
cagtcagcaacagggtcccgtc

SEQ ID NO: 2263 - RNA, 22 nt, synthetic construct
  source 1..22: mol_type = other RNA
cagtcctgtagaggctgaggtg

SEQ ID NO: 2264 - RNA, 22 nt, synthetic construct
  source 1..22: mol_type = other RNA
cagtctgccggcaggcttacct

SEQ ID NO: 2265 - RNA, 22 nt, synthetic construct
  source 1..22: mol_type = other RNA
cagtgccagctctccctgggcc

SEQ ID NO: 2266 - RNA, 22 nt, synthetic construct
  source 1..22: mol_type = other RNA
cagttcttccctgtccaacctc

SEQ ID NO: 2267 - RNA, 22 nt, synthetic construct
  source 1..22: mol_type = other RNA
catatccccagatctactgggt

SEQ ID NO: 2268 - RNA, 22 nt, synthetic construct
  source 1..22: mol_type = other RNA
catcacaaggagacacaggcct

SEQ ID NO: 2269 - RNA, 22 nt, synthetic construct
  source 1..22: mol_type = other RNA
catccccaggcccaatcctacc

SEQ ID NO: 2270 - RNA, 22 nt, synthetic construct
  source 1..22: mol_type = other RNA
catgaaaaacatcacaaggaga

SEQ ID NO: 2271 - RNA, 22 nt, synthetic construct
  source 1..22: mol_type = other RNA
catgcagcagcccttcaattac

SEQ ID NO: 2272 - RNA, 22 nt, synthetic construct
  source 1..22: mol_type = other RNA
catggcagctggtgagtcaggc

SEQ ID NO: 2273 - RNA, 22 nt, synthetic construct
  source 1..22: mol_type = other RNA
catggttctggttgccttggta

SEQ ID NO: 2274 - RNA, 22 nt, synthetic construct
  source 1..22: mol_type = other RNA
ccaacctctgtgcccagaaggc

SEQ ID NO: 2275 - RNA, 22 nt, synthetic construct
  source 1..22: mol_type = other RNA
ccaaggcaaccagaaccatgaa

SEQ ID NO: 2276 - RNA, 22 nt, synthetic construct
  source 1..22: mol_type = other RNA
ccaatcctaccaaggcaaccag

SEQ ID NO: 2277 - RNA, 22 nt, synthetic construct
  source 1..22: mol_type = other RNA
ccacagcacaggcctgtgtctc

SEQ ID NO: 2278 - RNA, 22 nt, synthetic construct
  source 1..22: mol_type = other RNA
ccaccaccaccaccgccaccgc

SEQ ID NO: 2279 - RNA, 22 nt, synthetic construct
  source 1..22: mol_type = other RNA
ccaccaccaccgccaccgccac

SEQ ID NO: 2280 - RNA, 22 nt, synthetic construct
  source 1..22: mol_type = other RNA
ccaccaccgccaccgccaccac

SEQ ID NO: 2281 - RNA, 22 nt, synthetic construct
  source 1..22: mol_type = other RNA
ccaccactaccacctccgccgc

SEQ ID NO: 2282 - RNA, 22 nt, synthetic construct
  source 1..22: mol_type = other RNA
ccaccactgcctccactaccgc

SEQ ID NO: 2283 - RNA, 22 nt, synthetic construct
  source 1..22: mol_type = other RNA
ccacccagtagatctggggata

SEQ ID NO: 2284 - RNA, 22 nt, synthetic construct
  source 1..22: mol_type = other RNA
ccacccctgaagaagagaggga

SEQ ID NO: 2285 - RNA, 22 nt, synthetic construct
  source 1..22: mol_type = other RNA
ccaccgccaccactaccacctc

SEQ ID NO: 2286 - RNA, 22 nt, synthetic construct
  source 1..22: mol_type = other RNA
ccaccgccaccgccaccactac

SEQ ID NO: 2287 - RNA, 22 nt, synthetic construct
  source 1..22: mol_type = other RNA
ccacctacagaaggagctggca

SEQ ID NO: 2288 - RNA, 22 nt, synthetic construct
  source 1..22: mol_type = other RNA
ccactaccacctccgccgccgc

SEQ ID NO: 2289 - RNA, 22 nt, synthetic construct
  source 1..22: mol_type = other RNA
ccactaccgctgccacccctga

SEQ ID NO: 2290 - RNA, 22 nt, synthetic construct
  source 1..22: mol_type = other RNA
ccactgcctccactaccgctgc

SEQ ID NO: 2291 - RNA, 22 nt, synthetic construct
  source 1..22: mol_type = other RNA
ccagaaccatgaaaaacatcac

SEQ ID NO: 2292 - RNA, 22 nt, synthetic construct
  source 1..22: mol_type = other RNA
ccagaaggcctggtcaaaggag

SEQ ID NO: 2293 - RNA, 22 nt, synthetic construct
  source 1..22: mol_type = other RNA
ccagatctactgggtggacagc

SEQ ID NO: 2294 - RNA, 22 nt, synthetic construct
  source 1..22: mol_type = other RNA
ccagcaaacggttttacttctt

SEQ ID NO: 2295 - RNA, 22 nt, synthetic construct
  source 1..22: mol_type = other RNA
ccagccccagcaaacggtttta

SEQ ID NO: 2296 - RNA, 22 nt, synthetic construct
  source 1..22: mol_type = other RNA
ccagctccttctgtaggtggaa

SEQ ID NO: 2297 - RNA, 22 nt, synthetic construct
  source 1..22: mol_type = other RNA
ccagctctccctgggcccctcc

SEQ ID NO: 2298 - RNA, 22 nt, synthetic construct
  source 1..22: mol_type = other RNA
ccagctgccatgcagcagccct

SEQ ID NO: 2299 - RNA, 22 nt, synthetic construct
  source 1..22: mol_type = other RNA
ccagcttgcctcctcttgagca

SEQ ID NO: 2300 - RNA, 22 nt, synthetic construct
  source 1..22: mol_type = other RNA
ccaggcacagttcttccctgtc

SEQ ID NO: 2301 - RNA, 22 nt, synthetic construct
  source 1..22: mol_type = other RNA
ccaggcccaatcctaccaaggc

SEQ ID NO: 2302 - RNA, 22 nt, synthetic construct
  source 1..22: mol_type = other RNA
ccaggccttctgggcacagagg

SEQ ID NO: 2303 - RNA, 22 nt, synthetic construct
  source 1..22: mol_type = other RNA
ccagggagagctggcactgctg

SEQ ID NO: 2304 - RNA, 22 nt, synthetic construct
  source 1..22: mol_type = other RNA
ccagggcacagcagtctgccgg

SEQ ID NO: 2305 - RNA, 22 nt, synthetic construct
  source 1..22: mol_type = other RNA
ccagtagatctggggatatggg

SEQ ID NO: 2306 - RNA, 22 nt, synthetic construct
  source 1..22: mol_type = other RNA
ccatatccccagatctactggg

SEQ ID NO: 2307 - RNA, 22 nt, synthetic construct
  source 1..22: mol_type = other RNA
ccatgaaaaacatcacaaggag

SEQ ID NO: 2308 - RNA, 22 nt, synthetic construct
  source 1..22: mol_type = other RNA
ccatgcagcagcccttcaatta

SEQ ID NO: 2309 - RNA, 22 nt, synthetic construct
  source 1..22: mol_type = other RNA
cccaatcctaccaaggcaacca

SEQ ID NO: 2310 - RNA, 22 nt, synthetic construct
  source 1..22: mol_type = other RNA
cccagaaggcctggtcaaagga

SEQ ID NO: 2311 - RNA, 22 nt, synthetic construct
  source 1..22: mol_type = other RNA
cccagatctactgggtggacag

SEQ ID NO: 2312 - RNA, 22 nt, synthetic construct
  source 1..22: mol_type = other RNA
cccagcaaacggttttacttct

SEQ ID NO: 2313 - RNA, 22 nt, synthetic construct
  source 1..22: mol_type = other RNA
cccaggcccaatcctaccaagg

SEQ ID NO: 2314 - RNA, 22 nt, synthetic construct
  source 1..22: mol_type = other RNA
cccagggagagctggcactgct

SEQ ID NO: 2315 - RNA, 22 nt, synthetic construct
  source 1..22: mol_type = other RNA
cccagtagatctggggatatgg

SEQ ID NO: 2316 - RNA, 22 nt, synthetic construct
  source 1..22: mol_type = other RNA
cccatatccccagatctactgg

SEQ ID NO: 2317 - RNA, 22 nt, synthetic construct
  source 1..22: mol_type = other RNA
ccccagatctactgggtggaca

SEQ ID NO: 2318 - RNA, 22 nt, synthetic construct
  source 1..22: mol_type = other RNA
ccccagcaaacggttttacttc

SEQ ID NO: 2319 - RNA, 22 nt, synthetic construct
  source 1..22: mol_type = other RNA
ccccaggcccaatcctaccaag

SEQ ID NO: 2320 - RNA, 22 nt, synthetic construct
  source 1..22: mol_type = other RNA
cccctccaggcacagttcttcc

SEQ ID NO: 2321 - RNA, 22 nt, synthetic construct
  source 1..22: mol_type = other RNA
cccctgaagaagagagggaacc

SEQ ID NO: 2322 - RNA, 22 nt, synthetic construct
  source 1..22: mol_type = other RNA
cccgtccttgacacctcagcct

SEQ ID NO: 2323 - RNA, 22 nt, synthetic construct
  source 1..22: mol_type = other RNA
ccctccaggcacagttcttccc

SEQ ID NO: 2324 - RNA, 22 nt, synthetic construct
  source 1..22: mol_type = other RNA
ccctctcttcttcaggggtggc

SEQ ID NO: 2325 - RNA, 22 nt, synthetic construct
  source 1..22: mol_type = other RNA
ccctgaagaagagagggaacca

SEQ ID NO: 2326 - RNA, 22 nt, synthetic construct
  source 1..22: mol_type = other RNA
ccctgggcccctccaggcacag

SEQ ID NO: 2327 - RNA, 22 nt, synthetic construct
  source 1..22: mol_type = other RNA
ccctgtccaacctctgtgccca

SEQ ID NO: 2328 - RNA, 22 nt, synthetic construct
  source 1..22: mol_type = other RNA
ccctgttgctgactgctcaaga

SEQ ID NO: 2329 - RNA, 22 nt, synthetic construct
  source 1..22: mol_type = other RNA
cccttcaattacccatatcccc

SEQ ID NO: 2330 - RNA, 22 nt, synthetic construct
  source 1..22: mol_type = other RNA
ccgagaggtaagcctgccggca

SEQ ID NO: 2331 - RNA, 22 nt, synthetic construct
  source 1..22: mol_type = other RNA
ccgccaccactaccacctccgc

SEQ ID NO: 2332 - RNA, 22 nt, synthetic construct
  source 1..22: mol_type = other RNA
ccgccaccactgcctccactac

SEQ ID NO: 2333 - RNA, 22 nt, synthetic construct
  source 1..22: mol_type = other RNA
ccgccaccgccaccactaccac

SEQ ID NO: 2334 - RNA, 22 nt, synthetic construct
  source 1..22: mol_type = other RNA
ccgccgccaccactgcctccac

SEQ ID NO: 2335 - RNA, 22 nt, synthetic construct
  source 1..22: mol_type = other RNA
ccgctgccacccctgaagaaga

SEQ ID NO: 2336 - RNA, 22 nt, synthetic construct
  source 1..22: mol_type = other RNA
ccggcagactgctgtgccctgg

SEQ ID NO: 2337 - RNA, 22 nt, synthetic construct
  source 1..22: mol_type = other RNA
ccggcaggcttacctctcggag

SEQ ID NO: 2338 - RNA, 22 nt, synthetic construct
  source 1..22: mol_type = other RNA
ccgtccttgacacctcagcctc

SEQ ID NO: 2339 - RNA, 22 nt, synthetic construct
  source 1..22: mol_type = other RNA
ccgtttgctggggctggcctga

SEQ ID NO: 2340 - RNA, 22 nt, synthetic construct
  source 1..22: mol_type = other RNA
cctacagaaggagctggcagaa

SEQ ID NO: 2341 - RNA, 22 nt, synthetic construct
  source 1..22: mol_type = other RNA
cctaccaaggcaaccagaacca

SEQ ID NO: 2342 - RNA, 22 nt, synthetic construct
  source 1..22: mol_type = other RNA
cctcagcctctacaggactgag

SEQ ID NO: 2343 - RNA, 22 nt, synthetic construct
  source 1..22: mol_type = other RNA
cctccactaccgctgccacccc

SEQ ID NO: 2344 - RNA, 22 nt, synthetic construct
  source 1..22: mol_type = other RNA
cctccaggcacagttcttccct

SEQ ID NO: 2345 - RNA, 22 nt, synthetic construct
  source 1..22: mol_type = other RNA
cctccagggcacagcagtctgc

SEQ ID NO: 2346 - RNA, 22 nt, synthetic construct
  source 1..22: mol_type = other RNA
cctcctcttgagcagtcagcaa

SEQ ID NO: 2347 - RNA, 22 nt, synthetic construct
  source 1..22: mol_type = other RNA
cctcctttgaccaggccttctg

SEQ ID NO: 2348 - RNA, 22 nt, synthetic construct
  source 1..22: mol_type = other RNA
cctctacaggactgagaagaag

SEQ ID NO: 2349 - RNA, 22 nt, synthetic construct
  source 1..22: mol_type = other RNA
cctctcggagttctgccagctc

SEQ ID NO: 2350 - RNA, 22 nt, synthetic construct
  source 1..22: mol_type = other RNA
cctctcttcttcaggggtggca

SEQ ID NO: 2351 - RNA, 22 nt, synthetic construct
  source 1..22: mol_type = other RNA
cctctgtgcccagaaggcctgg

SEQ ID NO: 2352 - RNA, 22 nt, synthetic construct
  source 1..22: mol_type = other RNA
cctcttgagcagtcagcaacag

SEQ ID NO: 2353 - RNA, 22 nt, synthetic construct
  source 1..22: mol_type = other RNA
cctgaagaagagagggaaccac

SEQ ID NO: 2354 - RNA, 22 nt, synthetic construct
  source 1..22: mol_type = other RNA
cctgactcaccagctgccatgc

SEQ ID NO: 2355 - RNA, 22 nt, synthetic construct
  source 1..22: mol_type = other RNA
cctgccggcagactgctgtgcc

SEQ ID NO: 2356 - RNA, 22 nt, synthetic construct
  source 1..22: mol_type = other RNA
cctggaggggcccagggagagc

SEQ ID NO: 2357 - RNA, 22 nt, synthetic construct
  source 1..22: mol_type = other RNA
cctgggcccctccaggcacagt

SEQ ID NO: 2358 - RNA, 22 nt, synthetic construct
  source 1..22: mol_type = other RNA
cctggggatgtttcagctcttc

SEQ ID NO: 2359 - RNA, 22 nt, synthetic construct
  source 1..22: mol_type = other RNA
cctggtcaaaggaggccaccac

SEQ ID NO: 2360 - RNA, 22 nt, synthetic construct
  source 1..22: mol_type = other RNA
cctggtgcctccagggcacagc

SEQ ID NO: 2361 - RNA, 22 nt, synthetic construct
  source 1..22: mol_type = other RNA
cctgtagaggctgaggtgtcaa

SEQ ID NO: 2362 - RNA, 22 nt, synthetic construct
  source 1..22: mol_type = other RNA
cctgtccaacctctgtgcccag

SEQ ID NO: 2363 - RNA, 22 nt, synthetic construct
  source 1..22: mol_type = other RNA
cctgtgctgtggttccctctct

SEQ ID NO: 2364 - RNA, 22 nt, synthetic construct
  source 1..22: mol_type = other RNA
cctgtgtctccttgtgatgttt

SEQ ID NO: 2365 - RNA, 22 nt, synthetic construct
  source 1..22: mol_type = other RNA
cctgttgctgactgctcaagag

SEQ ID NO: 2366 - RNA, 22 nt, synthetic construct
  source 1..22: mol_type = other RNA
ccttcaattacccatatcccca

SEQ ID NO: 2367 - RNA, 22 nt, synthetic construct
  source 1..22: mol_type = other RNA
ccttctgggcacagaggttgga

SEQ ID NO: 2368 - RNA, 22 nt, synthetic construct
  source 1..22: mol_type = other RNA
ccttctgtaggtggaagagctg

SEQ ID NO: 2369 - RNA, 22 nt, synthetic construct
  source 1..22: mol_type = other RNA
ccttgacacctcagcctctaca

SEQ ID NO: 2370 - RNA, 22 nt, synthetic construct
  source 1..22: mol_type = other RNA
ccttggtaggattgggcctggg

SEQ ID NO: 2371 - RNA, 22 nt, synthetic construct
  source 1..22: mol_type = other RNA
ccttgtgatgtttttcatggtt

SEQ ID NO: 2372 - RNA, 22 nt, synthetic construct
  source 1..22: mol_type = other RNA
cctttgaccaggccttctgggc

SEQ ID NO: 2373 - RNA, 22 nt, synthetic construct
  source 1..22: mol_type = other RNA
cgagaggtaagcctgccggcag

SEQ ID NO: 2374 - RNA, 22 nt, synthetic construct
  source 1..22: mol_type = other RNA
cgccaccactaccacctccgcc

SEQ ID NO: 2375 - RNA, 22 nt, synthetic construct
  source 1..22: mol_type = other RNA
cgccaccactgcctccactacc

SEQ ID NO: 2376 - RNA, 22 nt, synthetic construct
  source 1..22: mol_type = other RNA
cgccaccgccaccactaccacc

SEQ ID NO: 2377 - RNA, 22 nt, synthetic construct
  source 1..22: mol_type = other RNA
cgccgccaccactgcctccact

SEQ ID NO: 2378 - RNA, 22 nt, synthetic construct
  source 1..22: mol_type = other RNA
cgctgccacccctgaagaagag

SEQ ID NO: 2379 - RNA, 22 nt, synthetic construct
  source 1..22: mol_type = other RNA
cggaggtggtagtggtggcggt

SEQ ID NO: 2380 - RNA, 22 nt, synthetic construct
  source 1..22: mol_type = other RNA
cggagttctgccagctccttct

SEQ ID NO: 2381 - RNA, 22 nt, synthetic construct
  source 1..22: mol_type = other RNA
cggcagactgctgtgccctgga

SEQ ID NO: 2382 - RNA, 22 nt, synthetic construct
  source 1..22: mol_type = other RNA
cggcaggcttacctctcggagt

SEQ ID NO: 2383 - RNA, 22 nt, synthetic construct
  source 1..22: mol_type = other RNA
cggcggaggtggtagtggtggc

SEQ ID NO: 2384 - RNA, 22 nt, synthetic construct
  source 1..22: mol_type = other RNA
cggcggcggaggtggtagtggt

SEQ ID NO: 2385 - RNA, 22 nt, synthetic construct
  source 1..22: mol_type = other RNA
cggcggcggcggaggtggtagt

SEQ ID NO: 2386 - RNA, 22 nt, synthetic construct
  source 1..22: mol_type = other RNA
cgggaccctgttgctgactgct

SEQ ID NO: 2387 - RNA, 22 nt, synthetic construct
  source 1..22: mol_type = other RNA
cggtagtggaggcagtggtggc

SEQ ID NO: 2388 - RNA, 22 nt, synthetic construct
  source 1..22: mol_type = other RNA
cggtggcggtggtggtggtggc

SEQ ID NO: 2389 - RNA, 22 nt, synthetic construct
  source 1..22: mol_type = other RNA
cggtggtggtggtggcctcctt

SEQ ID NO: 2390 - RNA, 22 nt, synthetic construct
  source 1..22: mol_type = other RNA
cggttttacttcttctcagtcc

SEQ ID NO: 2391 - RNA, 22 nt, synthetic construct
  source 1..22: mol_type = other RNA
cgtccttgacacctcagcctct

SEQ ID NO: 2392 - RNA, 22 nt, synthetic construct
  source 1..22: mol_type = other RNA
cgtttgctggggctggcctgac

SEQ ID NO: 2393 - RNA, 22 nt, synthetic construct
  source 1..22: mol_type = other RNA
ctacagaaggagctggcagaac

SEQ ID NO: 2394 - RNA, 22 nt, synthetic construct
  source 1..22: mol_type = other RNA
ctacaggactgagaagaagtaa

SEQ ID NO: 2395 - RNA, 22 nt, synthetic construct
  source 1..22: mol_type = other RNA
ctaccaaggcaaccagaaccat

SEQ ID NO: 2396 - RNA, 22 nt, synthetic construct
  source 1..22: mol_type = other RNA
ctaccgctgccacccctgaaga

SEQ ID NO: 2397 - RNA, 22 nt, synthetic construct
  source 1..22: mol_type = other RNA
ctactgggtggacagcagtgcc

SEQ ID NO: 2398 - RNA, 22 nt, synthetic construct
  source 1..22: mol_type = other RNA
ctataagagagatccagcttgc

SEQ ID NO: 2399 - RNA, 22 nt, synthetic construct
  source 1..22: mol_type = other RNA
ctatggaaactctataagagag

SEQ ID NO: 2400 - RNA, 22 nt, synthetic construct
  source 1..22: mol_type = other RNA
ctcaagaggaggcaagctggat

SEQ ID NO: 2401 - RNA, 22 nt, synthetic construct
  source 1..22: mol_type = other RNA
ctcaccagctgccatgcagcag

SEQ ID NO: 2402 - RNA, 22 nt, synthetic construct
  source 1..22: mol_type = other RNA
ctcagcctctacaggactgaga

SEQ ID NO: 2403 - RNA, 22 nt, synthetic construct
  source 1..22: mol_type = other RNA
ctcagtcctgtagaggctgagg

SEQ ID NO: 2404 - RNA, 22 nt, synthetic construct
  source 1..22: mol_type = other RNA
ctccactaccgctgccacccct

SEQ ID NO: 2405 - RNA, 22 nt, synthetic construct
  source 1..22: mol_type = other RNA
ctccaggcacagttcttccctg

SEQ ID NO: 2406 - RNA, 22 nt, synthetic construct
  source 1..22: mol_type = other RNA
ctccagggcacagcagtctgcc

SEQ ID NO: 2407 - RNA, 22 nt, synthetic construct
  source 1..22: mol_type = other RNA
ctccctgggcccctccaggcac

SEQ ID NO: 2408 - RNA, 22 nt, synthetic construct
  source 1..22: mol_type = other RNA
ctccgagaggtaagcctgccgg

SEQ ID NO: 2409 - RNA, 22 nt, synthetic construct
  source 1..22: mol_type = other RNA
ctcctcttgagcagtcagcaac

SEQ ID NO: 2410 - RNA, 22 nt, synthetic construct
  source 1..22: mol_type = other RNA
ctccttctgtaggtggaagagc

SEQ ID NO: 2411 - RNA, 22 nt, synthetic construct
  source 1..22: mol_type = other RNA
ctccttgtgatgtttttcatgg

SEQ ID NO: 2412 - RNA, 22 nt, synthetic construct
  source 1..22: mol_type = other RNA
ctcctttgaccaggccttctgg

SEQ ID NO: 2413 - RNA, 22 nt, synthetic construct
  source 1..22: mol_type = other RNA
ctcggagttctgccagctcctt

SEQ ID NO: 2414 - RNA, 22 nt, synthetic construct
  source 1..22: mol_type = other RNA
ctctacaggactgagaagaagt

SEQ ID NO: 2415 - RNA, 22 nt, synthetic construct
  source 1..22: mol_type = other RNA
ctctataagagagatccagctt

SEQ ID NO: 2416 - RNA, 22 nt, synthetic construct
  source 1..22: mol_type = other RNA
ctctccctgggcccctccaggc

SEQ ID NO: 2417 - RNA, 22 nt, synthetic construct
  source 1..22: mol_type = other RNA
ctctcggagttctgccagctcc

SEQ ID NO: 2418 - RNA, 22 nt, synthetic construct
  source 1..22: mol_type = other RNA
ctctcttcttcaggggtggcag

SEQ ID NO: 2419 - RNA, 22 nt, synthetic construct
  source 1..22: mol_type = other RNA
ctctgtgcccagaaggcctggt

SEQ ID NO: 2420 - RNA, 22 nt, synthetic construct
  source 1..22: mol_type = other RNA
ctcttccacctacagaaggagc

SEQ ID NO: 2421 - RNA, 22 nt, synthetic construct
  source 1..22: mol_type = other RNA
ctcttcttcaggggtggcagcg

SEQ ID NO: 2422 - RNA, 22 nt, synthetic construct
  source 1..22: mol_type = other RNA
ctcttgagcagtcagcaacagg

SEQ ID NO: 2423 - RNA, 22 nt, synthetic construct
  source 1..22: mol_type = other RNA
ctgaaacatccccaggcccaat

SEQ ID NO: 2424 - RNA, 22 nt, synthetic construct
  source 1..22: mol_type = other RNA
ctgaagaagagagggaaccaca

SEQ ID NO: 2425 - RNA, 22 nt, synthetic construct
  source 1..22: mol_type = other RNA
ctgactcaccagctgccatgca

SEQ ID NO: 2426 - RNA, 22 nt, synthetic construct
  source 1..22: mol_type = other RNA
ctgactgctcaagaggaggcaa

SEQ ID NO: 2427 - RNA, 22 nt, synthetic construct
  source 1..22: mol_type = other RNA
ctgagaagaagtaaaaccgttt

SEQ ID NO: 2428 - RNA, 22 nt, synthetic construct
  source 1..22: mol_type = other RNA
ctgaggtgtcaaggacgggacc

SEQ ID NO: 2429 - RNA, 22 nt, synthetic construct
  source 1..22: mol_type = other RNA
ctgcatggcagctggtgagtca

SEQ ID NO: 2430 - RNA, 22 nt, synthetic construct
  source 1..22: mol_type = other RNA
ctgccacccctgaagaagagag

SEQ ID NO: 2431 - RNA, 22 nt, synthetic construct
  source 1..22: mol_type = other RNA
ctgccagctccttctgtaggtg

SEQ ID NO: 2432 - RNA, 22 nt, synthetic construct
  source 1..22: mol_type = other RNA
ctgccatgcagcagcccttcaa

SEQ ID NO: 2433 - RNA, 22 nt, synthetic construct
  source 1..22: mol_type = other RNA
ctgccggcagactgctgtgccc

SEQ ID NO: 2434 - RNA, 22 nt, synthetic construct
  source 1..22: mol_type = other RNA
ctgccggcaggcttacctctcg

SEQ ID NO: 2435 - RNA, 22 nt, synthetic construct
  source 1..22: mol_type = other RNA
ctgcctccactaccgctgccac

SEQ ID NO: 2436 - RNA, 22 nt, synthetic construct
  source 1..22: mol_type = other RNA
ctgctcaagaggaggcaagctg

SEQ ID NO: 2437 - RNA, 22 nt, synthetic construct
  source 1..22: mol_type = other RNA
ctgctgcatggcagctggtgag

SEQ ID NO: 2438 - RNA, 22 nt, synthetic construct
  source 1..22: mol_type = other RNA
ctgctgtccacccagtagatct

SEQ ID NO: 2439 - RNA, 22 nt, synthetic construct
  source 1..22: mol_type = other RNA
ctggaggggcccagggagagct

SEQ ID NO: 2440 - RNA, 22 nt, synthetic construct
  source 1..22: mol_type = other RNA
ctggatctctcttatagagttt

SEQ ID NO: 2441 - RNA, 22 nt, synthetic construct
  source 1..22: mol_type = other RNA
ctggcactgctgtccacccagt

SEQ ID NO: 2442 - RNA, 22 nt, synthetic construct
  source 1..22: mol_type = other RNA
ctggcagaactccgagaggtaa

SEQ ID NO: 2443 - RNA, 22 nt, synthetic construct
  source 1..22: mol_type = other RNA
ctggcctgactcaccagctgcc

SEQ ID NO: 2444 - RNA, 22 nt, synthetic construct
  source 1..22: mol_type = other RNA
ctgggcacagaggttggacagg

SEQ ID NO: 2445 - RNA, 22 nt, synthetic construct
  source 1..22: mol_type = other RNA
ctgggcccctccaggcacagtt

SEQ ID NO: 2446 - RNA, 22 nt, synthetic construct
  source 1..22: mol_type = other RNA
ctggggatatgggtaattgaag

SEQ ID NO: 2447 - RNA, 22 nt, synthetic construct
  source 1..22: mol_type = other RNA
ctggggatgtttcagctcttcc

SEQ ID NO: 2448 - RNA, 22 nt, synthetic construct
  source 1..22: mol_type = other RNA
ctggggctggcctgactcacca

SEQ ID NO: 2449 - RNA, 22 nt, synthetic construct
  source 1..22: mol_type = other RNA
ctgggtggacagcagtgccagc

SEQ ID NO: 2450 - RNA, 22 nt, synthetic construct
  source 1..22: mol_type = other RNA
ctggtcaaaggaggccaccacc

SEQ ID NO: 2451 - RNA, 22 nt, synthetic construct
  source 1..22: mol_type = other RNA
ctggtgagtcaggccagcccca

SEQ ID NO: 2452 - RNA, 22 nt, synthetic construct
  source 1..22: mol_type = other RNA
ctggtgcctccagggcacagca

SEQ ID NO: 2453 - RNA, 22 nt, synthetic construct
  source 1..22: mol_type = other RNA
ctggttgccttggtaggattgg

SEQ ID NO: 2454 - RNA, 22 nt, synthetic construct
  source 1..22: mol_type = other RNA
ctgtagaggctgaggtgtcaag

SEQ ID NO: 2455 - RNA, 22 nt, synthetic construct
  source 1..22: mol_type = other RNA
ctgtaggtggaagagctgaaac

SEQ ID NO: 2456 - RNA, 22 nt, synthetic construct
  source 1..22: mol_type = other RNA
ctgtccaacctctgtgcccaga

SEQ ID NO: 2457 - RNA, 22 nt, synthetic construct
  source 1..22: mol_type = other RNA
ctgtccacccagtagatctggg

SEQ ID NO: 2458 - RNA, 22 nt, synthetic construct
  source 1..22: mol_type = other RNA
ctgtgcccagaaggcctggtca

SEQ ID NO: 2459 - RNA, 22 nt, synthetic construct
  source 1..22: mol_type = other RNA
ctgtgcctggaggggcccaggg

SEQ ID NO: 2460 - RNA, 22 nt, synthetic construct
  source 1..22: mol_type = other RNA
ctgtgctgtggttccctctctt

SEQ ID NO: 2461 - RNA, 22 nt, synthetic construct
  source 1..22: mol_type = other RNA
ctgtggttccctctcttcttca

SEQ ID NO: 2462 - RNA, 22 nt, synthetic construct
  source 1..22: mol_type = other RNA
ctgtgtctccttgtgatgtttt

SEQ ID NO: 2463 - RNA, 22 nt, synthetic construct
  source 1..22: mol_type = other RNA
ctgttgctgactgctcaagagg

SEQ ID NO: 2464 - RNA, 22 nt, synthetic construct
  source 1..22: mol_type = other RNA
cttacctctcggagttctgcca

SEQ ID NO: 2465 - RNA, 22 nt, synthetic construct
  source 1..22: mol_type = other RNA
cttcaattacccatatccccag

SEQ ID NO: 2466 - RNA, 22 nt, synthetic construct
  source 1..22: mol_type = other RNA
cttcaggggtggcagcggtagt

SEQ ID NO: 2467 - RNA, 22 nt, synthetic construct
  source 1..22: mol_type = other RNA
cttccacctacagaaggagctg

SEQ ID NO: 2468 - RNA, 22 nt, synthetic construct
  source 1..22: mol_type = other RNA
cttccctgtccaacctctgtgc

SEQ ID NO: 2469 - RNA, 22 nt, synthetic construct
  source 1..22: mol_type = other RNA
cttctcagtcctgtagaggctg

SEQ ID NO: 2470 - RNA, 22 nt, synthetic construct
  source 1..22: mol_type = other RNA
cttctgggcacagaggttggac

SEQ ID NO: 2471 - RNA, 22 nt, synthetic construct
  source 1..22: mol_type = other RNA
cttctgtaggtggaagagctga

SEQ ID NO: 2472 - RNA, 22 nt, synthetic construct
  source 1..22: mol_type = other RNA
cttcttcaggggtggcagcggt

SEQ ID NO: 2473 - RNA, 22 nt, synthetic construct
  source 1..22: mol_type = other RNA
cttcttctcagtcctgtagagg

SEQ ID NO: 2474 - RNA, 22 nt, synthetic construct
  source 1..22: mol_type = other RNA
cttgacacctcagcctctacag

SEQ ID NO: 2475 - RNA, 22 nt, synthetic construct
  source 1..22: mol_type = other RNA
cttgagcagtcagcaacagggt

SEQ ID NO: 2476 - RNA, 22 nt, synthetic construct
  source 1..22: mol_type = other RNA
cttgcctcctcttgagcagtca

SEQ ID NO: 2477 - RNA, 22 nt, synthetic construct
  source 1..22: mol_type = other RNA
cttggtaggattgggcctgggg

SEQ ID NO: 2478 - RNA, 22 nt, synthetic construct
  source 1..22: mol_type = other RNA
cttgtgatgtttttcatggttc

SEQ ID NO: 2479 - RNA, 22 nt, synthetic construct
  source 1..22: mol_type = other RNA
ctttgaccaggccttctgggca

SEQ ID NO: 2480 - RNA, 22 nt, synthetic construct
  source 1..22: mol_type = other RNA
gaaaaacatcacaaggagacac

SEQ ID NO: 2481 - RNA, 22 nt, synthetic construct
  source 1..22: mol_type = other RNA
gaaacatccccaggcccaatcc

SEQ ID NO: 2482 - RNA, 22 nt, synthetic construct
  source 1..22: mol_type = other RNA
gaaactctataagagagatcca

SEQ ID NO: 2483 - RNA, 22 nt, synthetic construct
  source 1..22: mol_type = other RNA
gaaccacagcacaggcctgtgt

SEQ ID NO: 2484 - RNA, 22 nt, synthetic construct
  source 1..22: mol_type = other RNA
gaaccatgaaaaacatcacaag

SEQ ID NO: 2485 - RNA, 22 nt, synthetic construct
  source 1..22: mol_type = other RNA
gaactccgagaggtaagcctgc

SEQ ID NO: 2486 - RNA, 22 nt, synthetic construct
  source 1..22: mol_type = other RNA
gaactgtgcctggaggggccca

SEQ ID NO: 2487 - RNA, 22 nt, synthetic construct
  source 1..22: mol_type = other RNA
gaagaactgtgcctggaggggc

SEQ ID NO: 2488 - RNA, 22 nt, synthetic construct
  source 1..22: mol_type = other RNA
gaagaagagagggaaccacagc

SEQ ID NO: 2489 - RNA, 22 nt, synthetic construct
  source 1..22: mol_type = other RNA
gaagaagtaaaaccgtttgctg

SEQ ID NO: 2490 - RNA, 22 nt, synthetic construct
  source 1..22: mol_type = other RNA
gaagagagggaaccacagcaca

SEQ ID NO: 2491 - RNA, 22 nt, synthetic construct
  source 1..22: mol_type = other RNA
gaagagctgaaacatccccagg

SEQ ID NO: 2492 - RNA, 22 nt, synthetic construct
  source 1..22: mol_type = other RNA
gaaggagctggcagaactccga

SEQ ID NO: 2493 - RNA, 22 nt, synthetic construct
  source 1..22: mol_type = other RNA
gaaggcctggtcaaaggaggcc

SEQ ID NO: 2494 - RNA, 22 nt, synthetic construct
  source 1..22: mol_type = other RNA
gaagggctgctgcatggcagct

SEQ ID NO: 2495 - RNA, 22 nt, synthetic construct
  source 1..22: mol_type = other RNA
gaagtaaaaccgtttgctgggg

SEQ ID NO: 2496 - RNA, 22 nt, synthetic construct
  source 1..22: mol_type = other RNA
gacacaggcctgtgctgtggtt

SEQ ID NO: 2497 - RNA, 22 nt, synthetic construct
  source 1..22: mol_type = other RNA
gacacctcagcctctacaggac

SEQ ID NO: 2498 - RNA, 22 nt, synthetic construct
  source 1..22: mol_type = other RNA
gacagcagtgccagctctccct

SEQ ID NO: 2499 - RNA, 22 nt, synthetic construct
  source 1..22: mol_type = other RNA
gacagggaagaactgtgcctgg

SEQ ID NO: 2500 - RNA, 22 nt, synthetic construct
  source 1..22: mol_type = other RNA
gaccaggccttctgggcacaga

SEQ ID NO: 2501 - RNA, 22 nt, synthetic construct
  source 1..22: mol_type = other RNA
gaccctgttgctgactgctcaa

SEQ ID NO: 2502 - RNA, 22 nt, synthetic construct
  source 1..22: mol_type = other RNA
gacgggaccctgttgctgactg

SEQ ID NO: 2503 - RNA, 22 nt, synthetic construct
  source 1..22: mol_type = other RNA
gactcaccagctgccatgcagc

SEQ ID NO: 2504 - RNA, 22 nt, synthetic construct
  source 1..22: mol_type = other RNA
gactgagaagaagtaaaaccgt

SEQ ID NO: 2505 - RNA, 22 nt, synthetic construct
  source 1..22: mol_type = other RNA
gactgctcaagaggaggcaagc

SEQ ID NO: 2506 - RNA, 22 nt, synthetic construct
  source 1..22: mol_type = other RNA
gactgctgtgccctggaggcac

SEQ ID NO: 2507 - RNA, 22 nt, synthetic construct
  source 1..22: mol_type = other RNA
gagaagaagtaaaaccgtttgc

SEQ ID NO: 2508 - RNA, 22 nt, synthetic construct
  source 1..22: mol_type = other RNA
gagacacaggcctgtgctgtgg

SEQ ID NO: 2509 - RNA, 22 nt, synthetic construct
  source 1..22: mol_type = other RNA
gagagatccagcttgcctcctc

SEQ ID NO: 2510 - RNA, 22 nt, synthetic construct
  source 1..22: mol_type = other RNA
gagagctggcactgctgtccac

SEQ ID NO: 2511 - RNA, 22 nt, synthetic construct
  source 1..22: mol_type = other RNA
gagagggaaccacagcacaggc

SEQ ID NO: 2512 - RNA, 22 nt, synthetic construct
  source 1..22: mol_type = other RNA
gagaggtaagcctgccggcaga

SEQ ID NO: 2513 - RNA, 22 nt, synthetic construct
  source 1..22: mol_type = other RNA
gagatccagcttgcctcctctt

SEQ ID NO: 2514 - RNA, 22 nt, synthetic construct
  source 1..22: mol_type = other RNA
gagcagtcagcaacagggtccc

SEQ ID NO: 2515 - RNA, 22 nt, synthetic construct
  source 1..22: mol_type = other RNA
gagctgaaacatccccaggccc

SEQ ID NO: 2516 - RNA, 22 nt, synthetic construct
  source 1..22: mol_type = other RNA
gagctggcactgctgtccaccc

SEQ ID NO: 2517 - RNA, 22 nt, synthetic construct
  source 1..22: mol_type = other RNA
gagctggcagaactccgagagg

SEQ ID NO: 2518 - RNA, 22 nt, synthetic construct
  source 1..22: mol_type = other RNA
gaggaggcaagctggatctctc

SEQ ID NO: 2519 - RNA, 22 nt, synthetic construct
  source 1..22: mol_type = other RNA
gaggcaagctggatctctctta

SEQ ID NO: 2520 - RNA, 22 nt, synthetic construct
  source 1..22: mol_type = other RNA
gaggccaccaccaccaccgcca

SEQ ID NO: 2521 - RNA, 22 nt, synthetic construct
  source 1..22: mol_type = other RNA
gaggctgaggtgtcaaggacgg

SEQ ID NO: 2522 - RNA, 22 nt, synthetic construct
  source 1..22: mol_type = other RNA
gagggaaccacagcacaggcct

SEQ ID NO: 2523 - RNA, 22 nt, synthetic construct
  source 1..22: mol_type = other RNA
gaggggcccagggagagctggc

SEQ ID NO: 2524 - RNA, 22 nt, synthetic construct
  source 1..22: mol_type = other RNA
gaggtaagcctgccggcagact

SEQ ID NO: 2525 - RNA, 22 nt, synthetic construct
  source 1..22: mol_type = other RNA
gaggtggtagtggtggcggtgg

SEQ ID NO: 2526 - RNA, 22 nt, synthetic construct
  source 1..22: mol_type = other RNA
gaggtgtcaaggacgggaccct

SEQ ID NO: 2527 - RNA, 22 nt, synthetic construct
  source 1..22: mol_type = other RNA
gaggttggacagggaagaactg

SEQ ID NO: 2528 - RNA, 22 nt, synthetic construct
  source 1..22: mol_type = other RNA
gagtcaggccagccccagcaaa

SEQ ID NO: 2529 - RNA, 22 nt, synthetic construct
  source 1..22: mol_type = other RNA
gagttctgccagctccttctgt

SEQ ID NO: 2530 - RNA, 22 nt, synthetic construct
  source 1..22: mol_type = other RNA
gatatgggtaattgaagggctg

SEQ ID NO: 2531 - RNA, 22 nt, synthetic construct
  source 1..22: mol_type = other RNA
gatccagcttgcctcctcttga

SEQ ID NO: 2532 - RNA, 22 nt, synthetic construct
  source 1..22: mol_type = other RNA
gatctactgggtggacagcagt

SEQ ID NO: 2533 - RNA, 22 nt, synthetic construct
  source 1..22: mol_type = other RNA
gatctggggatatgggtaattg

SEQ ID NO: 2534 - RNA, 22 nt, synthetic construct
  source 1..22: mol_type = other RNA
gatgtttcagctcttccaccta

SEQ ID NO: 2535 - RNA, 22 nt, synthetic construct
  source 1..22: mol_type = other RNA
gatgtttttcatggttctggtt

SEQ ID NO: 2536 - RNA, 22 nt, synthetic construct
  source 1..22: mol_type = other RNA
gattgggcctggggatgtttca

SEQ ID NO: 2537 - RNA, 22 nt, synthetic construct
  source 1..22: mol_type = other RNA
gcaaacggttttacttcttctc

SEQ ID NO: 2538 - RNA, 22 nt, synthetic construct
  source 1..22: mol_type = other RNA
gcaacagggtcccgtccttgac

SEQ ID NO: 2539 - RNA, 22 nt, synthetic construct
  source 1..22: mol_type = other RNA
gcaaccagaaccatgaaaaaca

SEQ ID NO: 2540 - RNA, 22 nt, synthetic construct
  source 1..22: mol_type = other RNA
gcaagctggatctctcttatag

SEQ ID NO: 2541 - RNA, 22 nt, synthetic construct
  source 1..22: mol_type = other RNA
gcacagaggttggacagggaag

SEQ ID NO: 2542 - RNA, 22 nt, synthetic construct
  source 1..22: mol_type = other RNA
gcacagcagtctgccggcaggc

SEQ ID NO: 2543 - RNA, 22 nt, synthetic construct
  source 1..22: mol_type = other RNA
gcacaggcctgtgtctccttgt

SEQ ID NO: 2544 - RNA, 22 nt, synthetic construct
  source 1..22: mol_type = other RNA
gcacagttcttccctgtccaac

SEQ ID NO: 2545 - RNA, 22 nt, synthetic construct
  source 1..22: mol_type = other RNA
gcactgctgtccacccagtaga

SEQ ID NO: 2546 - RNA, 22 nt, synthetic construct
  source 1..22: mol_type = other RNA
gcagaactccgagaggtaagcc

SEQ ID NO: 2547 - RNA, 22 nt, synthetic construct
  source 1..22: mol_type = other RNA
gcagactgctgtgccctggagg

SEQ ID NO: 2548 - RNA, 22 nt, synthetic construct
  source 1..22: mol_type = other RNA
gcagcagcccttcaattaccca

SEQ ID NO: 2549 - RNA, 22 nt, synthetic construct
  source 1..22: mol_type = other RNA
gcagcccttcaattacccatat

SEQ ID NO: 2550 - RNA, 22 nt, synthetic construct
  source 1..22: mol_type = other RNA
gcagcggtagtggaggcagtgg

SEQ ID NO: 2551 - RNA, 22 nt, synthetic construct
  source 1..22: mol_type = other RNA
gcagctggtgagtcaggccagc

SEQ ID NO: 2552 - RNA, 22 nt, synthetic construct
  source 1..22: mol_type = other RNA
gcaggcttacctctcggagttc

SEQ ID NO: 2553 - RNA, 22 nt, synthetic construct
  source 1..22: mol_type = other RNA
gcagtcagcaacagggtcccgt

SEQ ID NO: 2554 - RNA, 22 nt, synthetic construct
  source 1..22: mol_type = other RNA
gcagtctgccggcaggcttacc

SEQ ID NO: 2555 - RNA, 22 nt, synthetic construct
  source 1..22: mol_type = other RNA
gcagtgccagctctccctgggc

SEQ ID NO: 2556 - RNA, 22 nt, synthetic construct
  source 1..22: mol_type = other RNA
gcatggcagctggtgagtcagg

SEQ ID NO: 2557 - RNA, 22 nt, synthetic construct
  source 1..22: mol_type = other RNA
gccaccaccaccaccgccaccg

SEQ ID NO: 2558 - RNA, 22 nt, synthetic construct
  source 1..22: mol_type = other RNA
gccaccactaccacctccgccg

SEQ ID NO: 2559 - RNA, 22 nt, synthetic construct
  source 1..22: mol_type = other RNA
gccaccactgcctccactaccg

SEQ ID NO: 2560 - RNA, 22 nt, synthetic construct
  source 1..22: mol_type = other RNA
gccacccctgaagaagagaggg

SEQ ID NO: 2561 - RNA, 22 nt, synthetic construct
  source 1..22: mol_type = other RNA
gccaccgccaccactaccacct

SEQ ID NO: 2562 - RNA, 22 nt, synthetic construct
  source 1..22: mol_type = other RNA
gccagccccagcaaacggtttt

SEQ ID NO: 2563 - RNA, 22 nt, synthetic construct
  source 1..22: mol_type = other RNA
gccagctccttctgtaggtgga

SEQ ID NO: 2564 - RNA, 22 nt, synthetic construct
  source 1..22: mol_type = other RNA
gccagctctccctgggcccctc

SEQ ID NO: 2565 - RNA, 22 nt, synthetic construct
  source 1..22: mol_type = other RNA
gccatgcagcagcccttcaatt

SEQ ID NO: 2566 - RNA, 22 nt, synthetic construct
  source 1..22: mol_type = other RNA
gcccaatcctaccaaggcaacc

SEQ ID NO: 2567 - RNA, 22 nt, synthetic construct
  source 1..22: mol_type = other RNA
gcccagaaggcctggtcaaagg

SEQ ID NO: 2568 - RNA, 22 nt, synthetic construct
  source 1..22: mol_type = other RNA
gcccagggagagctggcactgc

SEQ ID NO: 2569 - RNA, 22 nt, synthetic construct
  source 1..22: mol_type = other RNA
gccccagcaaacggttttactt

SEQ ID NO: 2570 - RNA, 22 nt, synthetic construct
  source 1..22: mol_type = other RNA
gcccctccaggcacagttcttc

SEQ ID NO: 2571 - RNA, 22 nt, synthetic construct
  source 1..22: mol_type = other RNA
gcccttcaattacccatatccc

SEQ ID NO: 2572 - RNA, 22 nt, synthetic construct
  source 1..22: mol_type = other RNA
gccgccaccactgcctccacta

SEQ ID NO: 2573 - RNA, 22 nt, synthetic construct
  source 1..22: mol_type = other RNA
gccgccgccaccactgcctcca

SEQ ID NO: 2574 - RNA, 22 nt, synthetic construct
  source 1..22: mol_type = other RNA
gccggcagactgctgtgccctg

SEQ ID NO: 2575 - RNA, 22 nt, synthetic construct
  source 1..22: mol_type = other RNA
gccggcaggcttacctctcgga

SEQ ID NO: 2576 - RNA, 22 nt, synthetic construct
  source 1..22: mol_type = other RNA
gcctccactaccgctgccaccc

SEQ ID NO: 2577 - RNA, 22 nt, synthetic construct
  source 1..22: mol_type = other RNA
gcctccagggcacagcagtctg

SEQ ID NO: 2578 - RNA, 22 nt, synthetic construct
  source 1..22: mol_type = other RNA
gcctcctcttgagcagtcagca

SEQ ID NO: 2579 - RNA, 22 nt, synthetic construct
  source 1..22: mol_type = other RNA
gcctcctttgaccaggccttct

SEQ ID NO: 2580 - RNA, 22 nt, synthetic construct
  source 1..22: mol_type = other RNA
gcctctacaggactgagaagaa

SEQ ID NO: 2581 - RNA, 22 nt, synthetic construct
  source 1..22: mol_type = other RNA
gcctgactcaccagctgccatg

SEQ ID NO: 2582 - RNA, 22 nt, synthetic construct
  source 1..22: mol_type = other RNA
gcctgccggcagactgctgtgc

SEQ ID NO: 2583 - RNA, 22 nt, synthetic construct
  source 1..22: mol_type = other RNA
gcctggaggggcccagggagag

SEQ ID NO: 2584 - RNA, 22 nt, synthetic construct
  source 1..22: mol_type = other RNA
gcctggggatgtttcagctctt

SEQ ID NO: 2585 - RNA, 22 nt, synthetic construct
  source 1..22: mol_type = other RNA
gcctggtcaaaggaggccacca

SEQ ID NO: 2586 - RNA, 22 nt, synthetic construct
  source 1..22: mol_type = other RNA
gcctggtgcctccagggcacag

SEQ ID NO: 2587 - RNA, 22 nt, synthetic construct
  source 1..22: mol_type = other RNA
gcctgtgctgtggttccctctc

SEQ ID NO: 2588 - RNA, 22 nt, synthetic construct
  source 1..22: mol_type = other RNA
gcctgtgtctccttgtgatgtt

SEQ ID NO: 2589 - RNA, 22 nt, synthetic construct
  source 1..22: mol_type = other RNA
gccttctgggcacagaggttgg

SEQ ID NO: 2590 - RNA, 22 nt, synthetic construct
  source 1..22: mol_type = other RNA
gccttggtaggattgggcctgg

SEQ ID NO: 2591 - RNA, 22 nt, synthetic construct
  source 1..22: mol_type = other RNA
gcggaggtggtagtggtggcgg

SEQ ID NO: 2592 - RNA, 22 nt, synthetic construct
  source 1..22: mol_type = other RNA
gcggcggaggtggtagtggtgg

SEQ ID NO: 2593 - RNA, 22 nt, synthetic construct
  source 1..22: mol_type = other RNA
gcggcggcggaggtggtagtgg

SEQ ID NO: 2594 - RNA, 22 nt, synthetic construct
  source 1..22: mol_type = other RNA
gcggtagtggaggcagtggtgg

SEQ ID NO: 2595 - RNA, 22 nt, synthetic construct
  source 1..22: mol_type = other RNA
gcggtggcggtggtggtggtgg

SEQ ID NO: 2596 - RNA, 22 nt, synthetic construct
  source 1..22: mol_type = other RNA
gcggtggtggtggtggcctcct

SEQ ID NO: 2597 - RNA, 22 nt, synthetic construct
  source 1..22: mol_type = other RNA
gctatggaaactctataagaga

SEQ ID NO: 2598 - RNA, 22 nt, synthetic construct
  source 1..22: mol_type = other RNA
gctcaagaggaggcaagctgga

SEQ ID NO: 2599 - RNA, 22 nt, synthetic construct
  source 1..22: mol_type = other RNA
gctccttctgtaggtggaagag

SEQ ID NO: 2600 - RNA, 22 nt, synthetic construct
  source 1..22: mol_type = other RNA
gctctccctgggcccctccagg

SEQ ID NO: 2601 - RNA, 22 nt, synthetic construct
  source 1..22: mol_type = other RNA
gctcttccacctacagaaggag

SEQ ID NO: 2602 - RNA, 22 nt, synthetic construct
  source 1..22: mol_type = other RNA
gctgaaacatccccaggcccaa

SEQ ID NO: 2603 - RNA, 22 nt, synthetic construct
  source 1..22: mol_type = other RNA
gctgactgctcaagaggaggca

SEQ ID NO: 2604 - RNA, 22 nt, synthetic construct
  source 1..22: mol_type = other RNA
gctgaggtgtcaaggacgggac

SEQ ID NO: 2605 - RNA, 22 nt, synthetic construct
  source 1..22: mol_type = other RNA
gctgcatggcagctggtgagtc

SEQ ID NO: 2606 - RNA, 22 nt, synthetic construct
  source 1..22: mol_type = other RNA
gctgccacccctgaagaagaga

SEQ ID NO: 2607 - RNA, 22 nt, synthetic construct
  source 1..22: mol_type = other RNA
gctgccatgcagcagcccttca

SEQ ID NO: 2608 - RNA, 22 nt, synthetic construct
  source 1..22: mol_type = other RNA
gctgctgcatggcagctggtga

SEQ ID NO: 2609 - RNA, 22 nt, synthetic construct
  source 1..22: mol_type = other RNA
gctggatctctcttatagagtt

SEQ ID NO: 2610 - RNA, 22 nt, synthetic construct
  source 1..22: mol_type = other RNA
gctggcactgctgtccacccag

SEQ ID NO: 2611 - RNA, 22 nt, synthetic construct
  source 1..22: mol_type = other RNA
gctggcagaactccgagaggta

SEQ ID NO: 2612 - RNA, 22 nt, synthetic construct
  source 1..22: mol_type = other RNA
gctggcctgactcaccagctgc

SEQ ID NO: 2613 - RNA, 22 nt, synthetic construct
  source 1..22: mol_type = other RNA
gctggggctggcctgactcacc

SEQ ID NO: 2614 - RNA, 22 nt, synthetic construct
  source 1..22: mol_type = other RNA
gctggtgagtcaggccagcccc

SEQ ID NO: 2615 - RNA, 22 nt, synthetic construct
  source 1..22: mol_type = other RNA
gctgtccacccagtagatctgg

SEQ ID NO: 2616 - RNA, 22 nt, synthetic construct
  source 1..22: mol_type = other RNA
gctgtggttccctctcttcttc

SEQ ID NO: 2617 - RNA, 22 nt, synthetic construct
  source 1..22: mol_type = other RNA
gcttacctctcggagttctgcc

SEQ ID NO: 2618 - RNA, 22 nt, synthetic construct
  source 1..22: mol_type = other RNA
gcttgcctcctcttgagcagtc

SEQ ID NO: 2619 - RNA, 22 nt, synthetic construct
  source 1..22: mol_type = other RNA
ggaaactctataagagagatcc

SEQ ID NO: 2620 - RNA, 22 nt, synthetic construct
  source 1..22: mol_type = other RNA
ggaaccacagcacaggcctgtg

SEQ ID NO: 2621 - RNA, 22 nt, synthetic construct
  source 1..22: mol_type = other RNA
ggaagaactgtgcctggagggg

SEQ ID NO: 2622 - RNA, 22 nt, synthetic construct
  source 1..22: mol_type = other RNA
ggaagagctgaaacatccccag

SEQ ID NO: 2623 - RNA, 22 nt, synthetic construct
  source 1..22: mol_type = other RNA
ggacagcagtgccagctctccc

SEQ ID NO: 2624 - RNA, 22 nt, synthetic construct
  source 1..22: mol_type = other RNA
ggacagggaagaactgtgcctg

SEQ ID NO: 2625 - RNA, 22 nt, synthetic construct
  source 1..22: mol_type = other RNA
ggaccctgttgctgactgctca

SEQ ID NO: 2626 - RNA, 22 nt, synthetic construct
  source 1..22: mol_type = other RNA
ggacgggaccctgttgctgact

SEQ ID NO: 2627 - RNA, 22 nt, synthetic construct
  source 1..22: mol_type = other RNA
ggactgagaagaagtaaaaccg

SEQ ID NO: 2628 - RNA, 22 nt, synthetic construct
  source 1..22: mol_type = other RNA
ggagacacaggcctgtgctgtg

SEQ ID NO: 2629 - RNA, 22 nt, synthetic construct
  source 1..22: mol_type = other RNA
ggagagctggcactgctgtcca

SEQ ID NO: 2630 - RNA, 22 nt, synthetic construct
  source 1..22: mol_type = other RNA
ggagctggcagaactccgagag

SEQ ID NO: 2631 - RNA, 22 nt, synthetic construct
  source 1..22: mol_type = other RNA
ggaggcaagctggatctctctt

SEQ ID NO: 2632 - RNA, 22 nt, synthetic construct
  source 1..22: mol_type = other RNA
ggaggccaccaccaccaccgcc

SEQ ID NO: 2633 - RNA, 22 nt, synthetic construct
  source 1..22: mol_type = other RNA
ggaggggcccagggagagctgg

SEQ ID NO: 2634 - RNA, 22 nt, synthetic construct
  source 1..22: mol_type = other RNA
ggaggtggtagtggtggcggtg

SEQ ID NO: 2635 - RNA, 22 nt, synthetic construct
  source 1..22: mol_type = other RNA
ggagttctgccagctccttctg

SEQ ID NO: 2636 - RNA, 22 nt, synthetic construct
  source 1..22: mol_type = other RNA
ggatatgggtaattgaagggct

SEQ ID NO: 2637 - RNA, 22 nt, synthetic construct
  source 1..22: mol_type = other RNA
ggatctctcttatagagtttcc

SEQ ID NO: 2638 - RNA, 22 nt, synthetic construct
  source 1..22: mol_type = other RNA
ggatgtttcagctcttccacct

SEQ ID NO: 2639 - RNA, 22 nt, synthetic construct
  source 1..22: mol_type = other RNA
ggattgggcctggggatgtttc

SEQ ID NO: 2640 - RNA, 22 nt, synthetic construct
  source 1..22: mol_type = other RNA
ggcaaccagaaccatgaaaaac

SEQ ID NO: 2641 - RNA, 22 nt, synthetic construct
  source 1..22: mol_type = other RNA
ggcaagctggatctctcttata

SEQ ID NO: 2642 - RNA, 22 nt, synthetic construct
  source 1..22: mol_type = other RNA
ggcacagaggttggacagggaa

SEQ ID NO: 2643 - RNA, 22 nt, synthetic construct
  source 1..22: mol_type = other RNA
ggcacagcagtctgccggcagg

SEQ ID NO: 2644 - RNA, 22 nt, synthetic construct
  source 1..22: mol_type = other RNA
ggcacagttcttccctgtccaa

SEQ ID NO: 2645 - RNA, 22 nt, synthetic construct
  source 1..22: mol_type = other RNA
ggcactgctgtccacccagtag

SEQ ID NO: 2646 - RNA, 22 nt, synthetic construct
  source 1..22: mol_type = other RNA
ggcagaactccgagaggtaagc

SEQ ID NO: 2647 - RNA, 22 nt, synthetic construct
  source 1..22: mol_type = other RNA
ggcagactgctgtgccctggag

SEQ ID NO: 2648 - RNA, 22 nt, synthetic construct
  source 1..22: mol_type = other RNA
ggcagcggtagtggaggcagtg

SEQ ID NO: 2649 - RNA, 22 nt, synthetic construct
  source 1..22: mol_type = other RNA
ggcagctggtgagtcaggccag

SEQ ID NO: 2650 - RNA, 22 nt, synthetic construct
  source 1..22: mol_type = other RNA
ggcaggcttacctctcggagtt

SEQ ID NO: 2651 - RNA, 22 nt, synthetic construct
  source 1..22: mol_type = other RNA
ggccaccaccaccaccgccacc

SEQ ID NO: 2652 - RNA, 22 nt, synthetic construct
  source 1..22: mol_type = other RNA
ggccagccccagcaaacggttt

SEQ ID NO: 2653 - RNA, 22 nt, synthetic construct
  source 1..22: mol_type = other RNA
ggcccaatcctaccaaggcaac

SEQ ID NO: 2654 - RNA, 22 nt, synthetic construct
  source 1..22: mol_type = other RNA
ggcccagggagagctggcactg

SEQ ID NO: 2655 - RNA, 22 nt, synthetic construct
  source 1..22: mol_type = other RNA
ggcccctccaggcacagttctt

SEQ ID NO: 2656 - RNA, 22 nt, synthetic construct
  source 1..22: mol_type = other RNA
ggcctcctttgaccaggccttc

SEQ ID NO: 2657 - RNA, 22 nt, synthetic construct
  source 1..22: mol_type = other RNA
ggcctgactcaccagctgccat

SEQ ID NO: 2658 - RNA, 22 nt, synthetic construct
  source 1..22: mol_type = other RNA
ggcctggggatgtttcagctct

SEQ ID NO: 2659 - RNA, 22 nt, synthetic construct
  source 1..22: mol_type = other RNA
ggcctggtcaaaggaggccacc

SEQ ID NO: 2660 - RNA, 22 nt, synthetic construct
  source 1..22: mol_type = other RNA
ggcctgtgctgtggttccctct

SEQ ID NO: 2661 - RNA, 22 nt, synthetic construct
  source 1..22: mol_type = other RNA
ggcctgtgtctccttgtgatgt

SEQ ID NO: 2662 - RNA, 22 nt, synthetic construct
  source 1..22: mol_type = other RNA
ggccttctgggcacagaggttg

SEQ ID NO: 2663 - RNA, 22 nt, synthetic construct
  source 1..22: mol_type = other RNA
ggcggaggtggtagtggtggcg

SEQ ID NO: 2664 - RNA, 22 nt, synthetic construct
  source 1..22: mol_type = other RNA
ggcggcggaggtggtagtggtg

SEQ ID NO: 2665 - RNA, 22 nt, synthetic construct
  source 1..22: mol_type = other RNA
ggcggcggcggaggtggtagtg

SEQ ID NO: 2666 - RNA, 22 nt, synthetic construct
  source 1..22: mol_type = other RNA
ggcggtggcggtggtggtggtg

SEQ ID NO: 2667 - RNA, 22 nt, synthetic construct
  source 1..22: mol_type = other RNA
ggcggtggtggtggtggcctcc

SEQ ID NO: 2668 - RNA, 22 nt, synthetic construct
  source 1..22: mol_type = other RNA
ggctgaggtgtcaaggacggga

SEQ ID NO: 2669 - RNA, 22 nt, synthetic construct
  source 1..22: mol_type = other RNA
ggctgctgcatggcagctggtg

SEQ ID NO: 2670 - RNA, 22 nt, synthetic construct
  source 1..22: mol_type = other RNA
ggctggcctgactcaccagctg

SEQ ID NO: 2671 - RNA, 22 nt, synthetic construct
  source 1..22: mol_type = other RNA
ggcttacctctcggagttctgc

SEQ ID NO: 2672 - RNA, 22 nt, synthetic construct
  source 1..22: mol_type = other RNA
gggaaccacagcacaggcctgt

SEQ ID NO: 2673 - RNA, 22 nt, synthetic construct
  source 1..22: mol_type = other RNA
gggaagaactgtgcctggaggg

SEQ ID NO: 2674 - RNA, 22 nt, synthetic construct
  source 1..22: mol_type = other RNA
gggaccctgttgctgactgctc

SEQ ID NO: 2675 - RNA, 22 nt, synthetic construct
  source 1..22: mol_type = other RNA
gggagagctggcactgctgtcc

SEQ ID NO: 2676 - RNA, 22 nt, synthetic construct
  source 1..22: mol_type = other RNA
gggatatgggtaattgaagggc

SEQ ID NO: 2677 - RNA, 22 nt, synthetic construct
  source 1..22: mol_type = other RNA
gggatgtttcagctcttccacc

SEQ ID NO: 2678 - RNA, 22 nt, synthetic construct
  source 1..22: mol_type = other RNA
gggcacagaggttggacaggga

SEQ ID NO: 2679 - RNA, 22 nt, synthetic construct
  source 1..22: mol_type = other RNA
gggcacagcagtctgccggcag

SEQ ID NO: 2680 - RNA, 22 nt, synthetic construct
  source 1..22: mol_type = other RNA
gggcccagggagagctggcact

SEQ ID NO: 2681 - RNA, 22 nt, synthetic construct
  source 1..22: mol_type = other RNA
gggcccctccaggcacagttct

SEQ ID NO: 2682 - RNA, 22 nt, synthetic construct
  source 1..22: mol_type = other RNA
gggcctggggatgtttcagctc

SEQ ID NO: 2683 - RNA, 22 nt, synthetic construct
  source 1..22: mol_type = other RNA
gggctgctgcatggcagctggt

SEQ ID NO: 2684 - RNA, 22 nt, synthetic construct
  source 1..22: mol_type = other RNA
gggctggcctgactcaccagct

SEQ ID NO: 2685 - RNA, 22 nt, synthetic construct
  source 1..22: mol_type = other RNA
ggggatatgggtaattgaaggg

SEQ ID NO: 2686 - RNA, 22 nt, synthetic construct
  source 1..22: mol_type = other RNA
ggggatgtttcagctcttccac

SEQ ID NO: 2687 - RNA, 22 nt, synthetic construct
  source 1..22: mol_type = other RNA
ggggcccagggagagctggcac

SEQ ID NO: 2688 - RNA, 22 nt, synthetic construct
  source 1..22: mol_type = other RNA
ggggctggcctgactcaccagc

SEQ ID NO: 2689 - RNA, 22 nt, synthetic construct
  source 1..22: mol_type = other RNA
ggggtggcagcggtagtggagg

SEQ ID NO: 2690 - RNA, 22 nt, synthetic construct
  source 1..22: mol_type = other RNA
gggtaattgaagggctgctgca

SEQ ID NO: 2691 - RNA, 22 nt, synthetic construct
  source 1..22: mol_type = other RNA
gggtcccgtccttgacacctca

SEQ ID NO: 2692 - RNA, 22 nt, synthetic construct
  source 1..22: mol_type = other RNA
gggtggacagcagtgccagctc

SEQ ID NO: 2693 - RNA, 22 nt, synthetic construct
  source 1..22: mol_type = other RNA
gggtggcagcggtagtggaggc

SEQ ID NO: 2694 - RNA, 22 nt, synthetic construct
  source 1..22: mol_type = other RNA
ggtaagcctgccggcagactgc

SEQ ID NO: 2695 - RNA, 22 nt, synthetic construct
  source 1..22: mol_type = other RNA
ggtaattgaagggctgctgcat

SEQ ID NO: 2696 - RNA, 22 nt, synthetic construct
  source 1..22: mol_type = other RNA
ggtaggattgggcctggggatg

SEQ ID NO: 2697 - RNA, 22 nt, synthetic construct
  source 1..22: mol_type = other RNA
ggtagtggaggcagtggtggcg

SEQ ID NO: 2698 - RNA, 22 nt, synthetic construct
  source 1..22: mol_type = other RNA
ggtagtggtggcggtggcggtg

SEQ ID NO: 2699 - RNA, 22 nt, synthetic construct
  source 1..22: mol_type = other RNA
ggtcaaaggaggccaccaccac

SEQ ID NO: 2700 - RNA, 22 nt, synthetic construct
  source 1..22: mol_type = other RNA
ggtcccgtccttgacacctcag

SEQ ID NO: 2701 - RNA, 22 nt, synthetic construct
  source 1..22: mol_type = other RNA
ggtgagtcaggccagccccagc

SEQ ID NO: 2702 - RNA, 22 nt, synthetic construct
  source 1..22: mol_type = other RNA
ggtgcctccagggcacagcagt

SEQ ID NO: 2703 - RNA, 22 nt, synthetic construct
  source 1..22: mol_type = other RNA
ggtggaagagctgaaacatccc

SEQ ID NO: 2704 - RNA, 22 nt, synthetic construct
  source 1..22: mol_type = other RNA
ggtggacagcagtgccagctct

SEQ ID NO: 2705 - RNA, 22 nt, synthetic construct
  source 1..22: mol_type = other RNA
ggtggcagcggtagtggaggca

SEQ ID NO: 2706 - RNA, 22 nt, synthetic construct
  source 1..22: mol_type = other RNA
ggtggcctcctttgaccaggcc

SEQ ID NO: 2707 - RNA, 22 nt, synthetic construct
  source 1..22: mol_type = other RNA
ggtggcggtggcggtggtggtg

SEQ ID NO: 2708 - RNA, 22 nt, synthetic construct
  source 1..22: mol_type = other RNA
ggtggcggtggtggtggtggcc

SEQ ID NO: 2709 - RNA, 22 nt, synthetic construct
  source 1..22: mol_type = other RNA
ggtggtagtggtggcggtggcg

SEQ ID NO: 2710 - RNA, 22 nt, synthetic construct
  source 1..22: mol_type = other RNA
ggtggtggcctcctttgaccag

SEQ ID NO: 2711 - RNA, 22 nt, synthetic construct
  source 1..22: mol_type = other RNA
ggtggtggtggcctcctttgac

SEQ ID NO: 2712 - RNA, 22 nt, synthetic construct
  source 1..22: mol_type = other RNA
ggtggtggtggtggcctccttt

SEQ ID NO: 2713 - RNA, 22 nt, synthetic construct
  source 1..22: mol_type = other RNA
ggtgtcaaggacgggaccctgt

SEQ ID NO: 2714 - RNA, 22 nt, synthetic construct
  source 1..22: mol_type = other RNA
ggttccctctcttcttcagggg

SEQ ID NO: 2715 - RNA, 22 nt, synthetic construct
  source 1..22: mol_type = other RNA
ggttctggttgccttggtagga

SEQ ID NO: 2716 - RNA, 22 nt, synthetic construct
  source 1..22: mol_type = other RNA
ggttgccttggtaggattgggc

SEQ ID NO: 2717 - RNA, 22 nt, synthetic construct
  source 1..22: mol_type = other RNA
ggttggacagggaagaactgtg

SEQ ID NO: 2718 - RNA, 22 nt, synthetic construct
  source 1..22: mol_type = other RNA
ggttttacttcttctcagtcct

SEQ ID NO: 2719 - RNA, 22 nt, synthetic construct
  source 1..22: mol_type = other RNA
gtaaaaccgtttgctggggctg

SEQ ID NO: 2720 - RNA, 22 nt, synthetic construct
  source 1..22: mol_type = other RNA
gtaagcctgccggcagactgct

SEQ ID NO: 2721 - RNA, 22 nt, synthetic construct
  source 1..22: mol_type = other RNA
gtaattgaagggctgctgcatg

SEQ ID NO: 2722 - RNA, 22 nt, synthetic construct
  source 1..22: mol_type = other RNA
gtagaggctgaggtgtcaagga

SEQ ID NO: 2723 - RNA, 22 nt, synthetic construct
  source 1..22: mol_type = other RNA
gtagatctggggatatgggtaa

SEQ ID NO: 2724 - RNA, 22 nt, synthetic construct
  source 1..22: mol_type = other RNA
gtaggattgggcctggggatgt

SEQ ID NO: 2725 - RNA, 22 nt, synthetic construct
  source 1..22: mol_type = other RNA
gtaggtggaagagctgaaacat

SEQ ID NO: 2726 - RNA, 22 nt, synthetic construct
  source 1..22: mol_type = other RNA
gtagtggaggcagtggtggcgg

SEQ ID NO: 2727 - RNA, 22 nt, synthetic construct
  source 1..22: mol_type = other RNA
gtagtggtggcggtggcggtgg

SEQ ID NO: 2728 - RNA, 22 nt, synthetic construct
  source 1..22: mol_type = other RNA
gtcaaaggaggccaccaccacc

SEQ ID NO: 2729 - RNA, 22 nt, synthetic construct
  source 1..22: mol_type = other RNA
gtcaaggacgggaccctgttgc

SEQ ID NO: 2730 - RNA, 22 nt, synthetic construct
  source 1..22: mol_type = other RNA
gtcagcaacagggtcccgtcct

SEQ ID NO: 2731 - RNA, 22 nt, synthetic construct
  source 1..22: mol_type = other RNA
gtcaggccagccccagcaaacg

SEQ ID NO: 2732 - RNA, 22 nt, synthetic construct
  source 1..22: mol_type = other RNA
gtccaacctctgtgcccagaag

SEQ ID NO: 2733 - RNA, 22 nt, synthetic construct
  source 1..22: mol_type = other RNA
gtccacccagtagatctgggga

SEQ ID NO: 2734 - RNA, 22 nt, synthetic construct
  source 1..22: mol_type = other RNA
gtcccgtccttgacacctcagc

SEQ ID NO: 2735 - RNA, 22 nt, synthetic construct
  source 1..22: mol_type = other RNA
gtcctgtagaggctgaggtgtc

SEQ ID NO: 2736 - RNA, 22 nt, synthetic construct
  source 1..22: mol_type = other RNA
gtccttgacacctcagcctcta

SEQ ID NO: 2737 - RNA, 22 nt, synthetic construct
  source 1..22: mol_type = other RNA
gtctccttgtgatgtttttcat

SEQ ID NO: 2738 - RNA, 22 nt, synthetic construct
  source 1..22: mol_type = other RNA
gtctgccggcaggcttacctct

SEQ ID NO: 2739 - RNA, 22 nt, synthetic construct
  source 1..22: mol_type = other RNA
gtgagtcaggccagccccagca

SEQ ID NO: 2740 - RNA, 22 nt, synthetic construct
  source 1..22: mol_type = other RNA
gtgatgtttttcatggttctgg

SEQ ID NO: 2741 - RNA, 22 nt, synthetic construct
  source 1..22: mol_type = other RNA
gtgccagctctccctgggcccc

SEQ ID NO: 2742 - RNA, 22 nt, synthetic construct
  source 1..22: mol_type = other RNA
gtgcccagaaggcctggtcaaa

SEQ ID NO: 2743 - RNA, 22 nt, synthetic construct
  source 1..22: mol_type = other RNA
gtgcctccagggcacagcagtc

SEQ ID NO: 2744 - RNA, 22 nt, synthetic construct
  source 1..22: mol_type = other RNA
gtgcctggaggggcccagggag

SEQ ID NO: 2745 - RNA, 22 nt, synthetic construct
  source 1..22: mol_type = other RNA
gtgctgtggttccctctcttct

SEQ ID NO: 2746 - RNA, 22 nt, synthetic construct
  source 1..22: mol_type = other RNA
gtggaagagctgaaacatcccc

SEQ ID NO: 2747 - RNA, 22 nt, synthetic construct
  source 1..22: mol_type = other RNA
gtggacagcagtgccagctctc

SEQ ID NO: 2748 - RNA, 22 nt, synthetic construct
  source 1..22: mol_type = other RNA
gtggaggcagtggtggcggcgg

SEQ ID NO: 2749 - RNA, 22 nt, synthetic construct
  source 1..22: mol_type = other RNA
gtggcagcggtagtggaggcag

SEQ ID NO: 2750 - RNA, 22 nt, synthetic construct
  source 1..22: mol_type = other RNA
gtggcctcctttgaccaggcct

SEQ ID NO: 2751 - RNA, 22 nt, synthetic construct
  source 1..22: mol_type = other RNA
gtggcggtggcggtggtggtgg

SEQ ID NO: 2752 - RNA, 22 nt, synthetic construct
  source 1..22: mol_type = other RNA
gtggcggtggtggtggtggcct

SEQ ID NO: 2753 - RNA, 22 nt, synthetic construct
  source 1..22: mol_type = other RNA
gtggtagtggtggcggtggcgg

SEQ ID NO: 2754 - RNA, 22 nt, synthetic construct
  source 1..22: mol_type = other RNA
gtggtggcctcctttgaccagg

SEQ ID NO: 2755 - RNA, 22 nt, synthetic construct
  source 1..22: mol_type = other RNA
gtggtggcggtggcggtggtgg

SEQ ID NO: 2756 - RNA, 22 nt, synthetic construct
  source 1..22: mol_type = other RNA
gtggtggtggcctcctttgacc

SEQ ID NO: 2757 - RNA, 22 nt, synthetic construct
  source 1..22: mol_type = other RNA
gtggtggtggtggcctcctttg

SEQ ID NO: 2758 - RNA, 22 nt, synthetic construct
  source 1..22: mol_type = other RNA
gtggttccctctcttcttcagg

SEQ ID NO: 2759 - RNA, 22 nt, synthetic construct
  source 1..22: mol_type = other RNA
gtgtcaaggacgggaccctgtt

SEQ ID NO: 2760 - RNA, 22 nt, synthetic construct
  source 1..22: mol_type = other RNA
gtgtctccttgtgatgtttttc

SEQ ID NO: 2761 - RNA, 22 nt, synthetic construct
  source 1..22: mol_type = other RNA
gttccctctcttcttcaggggt

SEQ ID NO: 2762 - RNA, 22 nt, synthetic construct
  source 1..22: mol_type = other RNA
gttctgccagctccttctgtag

SEQ ID NO: 2763 - RNA, 22 nt, synthetic construct
  source 1..22: mol_type = other RNA
gttctggttgccttggtaggat

SEQ ID NO: 2764 - RNA, 22 nt, synthetic construct
  source 1..22: mol_type = other RNA
gttcttccctgtccaacctctg

SEQ ID NO: 2765 - RNA, 22 nt, synthetic construct
  source 1..22: mol_type = other RNA
gttgccttggtaggattgggcc

SEQ ID NO: 2766 - RNA, 22 nt, synthetic construct
  source 1..22: mol_type = other RNA
gttgctgactgctcaagaggag

SEQ ID NO: 2767 - RNA, 22 nt, synthetic construct
  source 1..22: mol_type = other RNA
gttggacagggaagaactgtgc

SEQ ID NO: 2768 - RNA, 22 nt, synthetic construct
  source 1..22: mol_type = other RNA
gtttcagctcttccacctacag

SEQ ID NO: 2769 - RNA, 22 nt, synthetic construct
  source 1..22: mol_type = other RNA
gtttgctggggctggcctgact

SEQ ID NO: 2770 - RNA, 22 nt, synthetic construct
  source 1..22: mol_type = other RNA
gttttacttcttctcagtcctg

SEQ ID NO: 2771 - RNA, 22 nt, synthetic construct
  source 1..22: mol_type = other RNA
gtttttcatggttctggttgcc

SEQ ID NO: 2772 - RNA, 22 nt, synthetic construct
  source 1..22: mol_type = other RNA
taaaaccgtttgctggggctgg

SEQ ID NO: 2773 - RNA, 22 nt, synthetic construct
  source 1..22: mol_type = other RNA
taagagagatccagcttgcctc

SEQ ID NO: 2774 - RNA, 22 nt, synthetic construct
  source 1..22: mol_type = other RNA
taagcctgccggcagactgctg

SEQ ID NO: 2775 - RNA, 22 nt, synthetic construct
  source 1..22: mol_type = other RNA
taattgaagggctgctgcatgg

SEQ ID NO: 2776 - RNA, 22 nt, synthetic construct
  source 1..22: mol_type = other RNA
tacagaaggagctggcagaact

SEQ ID NO: 2777 - RNA, 22 nt, synthetic construct
  source 1..22: mol_type = other RNA
tacaggactgagaagaagtaaa

SEQ ID NO: 2778 - RNA, 22 nt, synthetic construct
  source 1..22: mol_type = other RNA
taccaaggcaaccagaaccatg

SEQ ID NO: 2779 - RNA, 22 nt, synthetic construct
  source 1..22: mol_type = other RNA
tacccatatccccagatctact

SEQ ID NO: 2780 - RNA, 22 nt, synthetic construct
  source 1..22: mol_type = other RNA
taccgctgccacccctgaagaa

SEQ ID NO: 2781 - RNA, 22 nt, synthetic construct
  source 1..22: mol_type = other RNA
tacctctcggagttctgccagc

SEQ ID NO: 2782 - RNA, 22 nt, synthetic construct
  source 1..22: mol_type = other RNA
tactgggtggacagcagtgcca

SEQ ID NO: 2783 - RNA, 22 nt, synthetic construct
  source 1..22: mol_type = other RNA
tacttcttctcagtcctgtaga

SEQ ID NO: 2784 - RNA, 22 nt, synthetic construct
  source 1..22: mol_type = other RNA
tagaggctgaggtgtcaaggac

SEQ ID NO: 2785 - RNA, 22 nt, synthetic construct
  source 1..22: mol_type = other RNA
tagatctggggatatgggtaat

SEQ ID NO: 2786 - RNA, 22 nt, synthetic construct
  source 1..22: mol_type = other RNA
tagctatggaaactctataaga

SEQ ID NO: 2787 - RNA, 22 nt, synthetic construct
  source 1..22: mol_type = other RNA
taggattgggcctggggatgtt

SEQ ID NO: 2788 - RNA, 22 nt, synthetic construct
  source 1..22: mol_type = other RNA
taggtggaagagctgaaacatc

SEQ ID NO: 2789 - RNA, 22 nt, synthetic construct
  source 1..22: mol_type = other RNA
tagtggaggcagtggtggcggc

SEQ ID NO: 2790 - RNA, 22 nt, synthetic construct
  source 1..22: mol_type = other RNA
tagtggtggcggtggcggtggt

SEQ ID NO: 2791 - RNA, 22 nt, synthetic construct
  source 1..22: mol_type = other RNA
tataagagagatccagcttgcc

SEQ ID NO: 2792 - RNA, 22 nt, synthetic construct
  source 1..22: mol_type = other RNA
tatccccagatctactgggtgg

SEQ ID NO: 2793 - RNA, 22 nt, synthetic construct
  source 1..22: mol_type = other RNA
tatgcctggtgcctccagggca

SEQ ID NO: 2794 - RNA, 22 nt, synthetic construct
  source 1..22: mol_type = other RNA
tatggaaactctataagagaga

SEQ ID NO: 2795 - RNA, 22 nt, synthetic construct
  source 1..22: mol_type = other RNA
tatgggtaattgaagggctgct

SEQ ID NO: 2796 - RNA, 22 nt, synthetic construct
  source 1..22: mol_type = other RNA
tcaaaggaggccaccaccacca

SEQ ID NO: 2797 - RNA, 22 nt, synthetic construct
  source 1..22: mol_type = other RNA
tcaagaggaggcaagctggatc

SEQ ID NO: 2798 - RNA, 22 nt, synthetic construct
  source 1..22: mol_type = other RNA
tcaaggacgggaccctgttgct

SEQ ID NO: 2799 - RNA, 22 nt, synthetic construct
  source 1..22: mol_type = other RNA
tcaattacccatatccccagat

SEQ ID NO: 2800 - RNA, 22 nt, synthetic construct
  source 1..22: mol_type = other RNA
tcacaaggagacacaggcctgt

SEQ ID NO: 2801 - RNA, 22 nt, synthetic construct
  source 1..22: mol_type = other RNA
tcaccagctgccatgcagcagc

SEQ ID NO: 2802 - RNA, 22 nt, synthetic construct
  source 1..22: mol_type = other RNA
tcagcaacagggtcccgtcctt

SEQ ID NO: 2803 - RNA, 22 nt, synthetic construct
  source 1..22: mol_type = other RNA
tcagcctctacaggactgagaa

SEQ ID NO: 2804 - RNA, 22 nt, synthetic construct
  source 1..22: mol_type = other RNA
tcagctcttccacctacagaag

SEQ ID NO: 2805 - RNA, 22 nt, synthetic construct
  source 1..22: mol_type = other RNA
tcaggccagccccagcaaacgg

SEQ ID NO: 2806 - RNA, 22 nt, synthetic construct
  source 1..22: mol_type = other RNA
tcaggggtggcagcggtagtgg

SEQ ID NO: 2807 - RNA, 22 nt, synthetic construct
  source 1..22: mol_type = other RNA
tcagtcctgtagaggctgaggt

SEQ ID NO: 2808 - RNA, 22 nt, synthetic construct
  source 1..22: mol_type = other RNA
tcatggttctggttgccttggt

SEQ ID NO: 2809 - RNA, 22 nt, synthetic construct
  source 1..22: mol_type = other RNA
tccaacctctgtgcccagaagg

SEQ ID NO: 2810 - RNA, 22 nt, synthetic construct
  source 1..22: mol_type = other RNA
tccacccagtagatctggggat

SEQ ID NO: 2811 - RNA, 22 nt, synthetic construct
  source 1..22: mol_type = other RNA
tccacctacagaaggagctggc

SEQ ID NO: 2812 - RNA, 22 nt, synthetic construct
  source 1..22: mol_type = other RNA
tccactaccgctgccacccctg

SEQ ID NO: 2813 - RNA, 22 nt, synthetic construct
  source 1..22: mol_type = other RNA
tccagcttgcctcctcttgagc

SEQ ID NO: 2814 - RNA, 22 nt, synthetic construct
  source 1..22: mol_type = other RNA
tccaggcacagttcttccctgt

SEQ ID NO: 2815 - RNA, 22 nt, synthetic construct
  source 1..22: mol_type = other RNA
tccagggcacagcagtctgccg

SEQ ID NO: 2816 - RNA, 22 nt, synthetic construct
  source 1..22: mol_type = other RNA
tccccagatctactgggtggac

SEQ ID NO: 2817 - RNA, 22 nt, synthetic construct
  source 1..22: mol_type = other RNA
tccccaggcccaatcctaccaa

SEQ ID NO: 2818 - RNA, 22 nt, synthetic construct
  source 1..22: mol_type = other RNA
tcccgtccttgacacctcagcc

SEQ ID NO: 2819 - RNA, 22 nt, synthetic construct
  source 1..22: mol_type = other RNA
tccctctcttcttcaggggtgg

SEQ ID NO: 2820 - RNA, 22 nt, synthetic construct
  source 1..22: mol_type = other RNA
tccctgggcccctccaggcaca

SEQ ID NO: 2821 - RNA, 22 nt, synthetic construct
  source 1..22: mol_type = other RNA
tccctgtccaacctctgtgccc

SEQ ID NO: 2822 - RNA, 22 nt, synthetic construct
  source 1..22: mol_type = other RNA
tccgagaggtaagcctgccggc

SEQ ID NO: 2823 - RNA, 22 nt, synthetic construct
  source 1..22: mol_type = other RNA
tcctaccaaggcaaccagaacc

SEQ ID NO: 2824 - RNA, 22 nt, synthetic construct
  source 1..22: mol_type = other RNA
tcctcttgagcagtcagcaaca

SEQ ID NO: 2825 - RNA, 22 nt, synthetic construct
  source 1..22: mol_type = other RNA
tcctgtagaggctgaggtgtca

SEQ ID NO: 2826 - RNA, 22 nt, synthetic construct
  source 1..22: mol_type = other RNA
tccttctgtaggtggaagagct

SEQ ID NO: 2827 - RNA, 22 nt, synthetic construct
  source 1..22: mol_type = other RNA
tccttgacacctcagcctctac

SEQ ID NO: 2828 - RNA, 22 nt, synthetic construct
  source 1..22: mol_type = other RNA
tccttgtgatgtttttcatggt

SEQ ID NO: 2829 - RNA, 22 nt, synthetic construct
  source 1..22: mol_type = other RNA
tcctttgaccaggccttctggg

SEQ ID NO: 2830 - RNA, 22 nt, synthetic construct
  source 1..22: mol_type = other RNA
tcggagttctgccagctccttc

SEQ ID NO: 2831 - RNA, 22 nt, synthetic construct
  source 1..22: mol_type = other RNA
tctacaggactgagaagaagta

SEQ ID NO: 2832 - RNA, 22 nt, synthetic construct
  source 1..22: mol_type = other RNA
tctactgggtggacagcagtgc

SEQ ID NO: 2833 - RNA, 22 nt, synthetic construct
  source 1..22: mol_type = other RNA
tctataagagagatccagcttg

SEQ ID NO: 2834 - RNA, 22 nt, synthetic construct
  source 1..22: mol_type = other RNA
tctcagtcctgtagaggctgag

SEQ ID NO: 2835 - RNA, 22 nt, synthetic construct
  source 1..22: mol_type = other RNA
tctccctgggcccctccaggca

SEQ ID NO: 2836 - RNA, 22 nt, synthetic construct
  source 1..22: mol_type = other RNA
tctccttgtgatgtttttcatg

SEQ ID NO: 2837 - RNA, 22 nt, synthetic construct
  source 1..22: mol_type = other RNA
tctcggagttctgccagctcct

SEQ ID NO: 2838 - RNA, 22 nt, synthetic construct
  source 1..22: mol_type = other RNA
tctcttcttcaggggtggcagc

SEQ ID NO: 2839 - RNA, 22 nt, synthetic construct
  source 1..22: mol_type = other RNA
tctgccagctccttctgtaggt

SEQ ID NO: 2840 - RNA, 22 nt, synthetic construct
  source 1..22: mol_type = other RNA
tctgccggcaggcttacctctc

SEQ ID NO: 2841 - RNA, 22 nt, synthetic construct
  source 1..22: mol_type = other RNA
tctgggcacagaggttggacag

SEQ ID NO: 2842 - RNA, 22 nt, synthetic construct
  source 1..22: mol_type = other RNA
tctggggatatgggtaattgaa

SEQ ID NO: 2843 - RNA, 22 nt, synthetic construct
  source 1..22: mol_type = other RNA
tctggttgccttggtaggattg

SEQ ID NO: 2844 - RNA, 22 nt, synthetic construct
  source 1..22: mol_type = other RNA
tctgtaggtggaagagctgaaa

SEQ ID NO: 2845 - RNA, 22 nt, synthetic construct
  source 1..22: mol_type = other RNA
tctgtgcccagaaggcctggtc

SEQ ID NO: 2846 - RNA, 22 nt, synthetic construct
  source 1..22: mol_type = other RNA
tcttcaggggtggcagcggtag

SEQ ID NO: 2847 - RNA, 22 nt, synthetic construct
  source 1..22: mol_type = other RNA
tcttccacctacagaaggagct

SEQ ID NO: 2848 - RNA, 22 nt, synthetic construct
  source 1..22: mol_type = other RNA
tcttccctgtccaacctctgtg

SEQ ID NO: 2849 - RNA, 22 nt, synthetic construct
  source 1..22: mol_type = other RNA
tcttctcagtcctgtagaggct

SEQ ID NO: 2850 - RNA, 22 nt, synthetic construct
  source 1..22: mol_type = other RNA
tcttcttcaggggtggcagcgg

SEQ ID NO: 2851 - RNA, 22 nt, synthetic construct
  source 1..22: mol_type = other RNA
tcttgagcagtcagcaacaggg

SEQ ID NO: 2852 - RNA, 22 nt, synthetic construct
  source 1..22: mol_type = other RNA
tgaaaaacatcacaaggagaca

SEQ ID NO: 2853 - RNA, 22 nt, synthetic construct
  source 1..22: mol_type = other RNA
tgaaacatccccaggcccaatc

SEQ ID NO: 2854 - RNA, 22 nt, synthetic construct
  source 1..22: mol_type = other RNA
tgaagaagagagggaaccacag

SEQ ID NO: 2855 - RNA, 22 nt, synthetic construct
  source 1..22: mol_type = other RNA
tgaagggctgctgcatggcagc

SEQ ID NO: 2856 - RNA, 22 nt, synthetic construct
  source 1..22: mol_type = other RNA
tgacacctcagcctctacagga

SEQ ID NO: 2857 - RNA, 22 nt, synthetic construct
  source 1..22: mol_type = other RNA
tgaccaggccttctgggcacag

SEQ ID NO: 2858 - RNA, 22 nt, synthetic construct
  source 1..22: mol_type = other RNA
tgactcaccagctgccatgcag

SEQ ID NO: 2859 - RNA, 22 nt, synthetic construct
  source 1..22: mol_type = other RNA
tgactgctcaagaggaggcaag

SEQ ID NO: 2860 - RNA, 22 nt, synthetic construct
  source 1..22: mol_type = other RNA
tgagaagaagtaaaaccgtttg

SEQ ID NO: 2861 - RNA, 22 nt, synthetic construct
  source 1..22: mol_type = other RNA
tgagcagtcagcaacagggtcc

SEQ ID NO: 2862 - RNA, 22 nt, synthetic construct
  source 1..22: mol_type = other RNA
tgaggtgtcaaggacgggaccc

SEQ ID NO: 2863 - RNA, 22 nt, synthetic construct
  source 1..22: mol_type = other RNA
tgagtcaggccagccccagcaa

SEQ ID NO: 2864 - RNA, 22 nt, synthetic construct
  source 1..22: mol_type = other RNA
tgatgtttttcatggttctggt

SEQ ID NO: 2865 - RNA, 22 nt, synthetic construct
  source 1..22: mol_type = other RNA
tgcagcagcccttcaattaccc

SEQ ID NO: 2866 - RNA, 22 nt, synthetic construct
  source 1..22: mol_type = other RNA
tgcatggcagctggtgagtcag

SEQ ID NO: 2867 - RNA, 22 nt, synthetic construct
  source 1..22: mol_type = other RNA
tgccacccctgaagaagagagg

SEQ ID NO: 2868 - RNA, 22 nt, synthetic construct
  source 1..22: mol_type = other RNA
tgccagctccttctgtaggtgg

SEQ ID NO: 2869 - RNA, 22 nt, synthetic construct
  source 1..22: mol_type = other RNA
tgccagctctccctgggcccct

SEQ ID NO: 2870 - RNA, 22 nt, synthetic construct
  source 1..22: mol_type = other RNA
tgccatgcagcagcccttcaat

SEQ ID NO: 2871 - RNA, 22 nt, synthetic construct
  source 1..22: mol_type = other RNA
tgcccagaaggcctggtcaaag

SEQ ID NO: 2872 - RNA, 22 nt, synthetic construct
  source 1..22: mol_type = other RNA
tgccggcagactgctgtgccct

SEQ ID NO: 2873 - RNA, 22 nt, synthetic construct
  source 1..22: mol_type = other RNA
tgccggcaggcttacctctcgg

SEQ ID NO: 2874 - RNA, 22 nt, synthetic construct
  source 1..22: mol_type = other RNA
tgcctccactaccgctgccacc

SEQ ID NO: 2875 - RNA, 22 nt, synthetic construct
  source 1..22: mol_type = other RNA
tgcctccagggcacagcagtct

SEQ ID NO: 2876 - RNA, 22 nt, synthetic construct
  source 1..22: mol_type = other RNA
tgcctcctcttgagcagtcagc

SEQ ID NO: 2877 - RNA, 22 nt, synthetic construct
  source 1..22: mol_type = other RNA
tgcctggaggggcccagggaga

SEQ ID NO: 2878 - RNA, 22 nt, synthetic construct
  source 1..22: mol_type = other RNA
tgcctggtgcctccagggcaca

SEQ ID NO: 2879 - RNA, 22 nt, synthetic construct
  source 1..22: mol_type = other RNA
tgccttggtaggattgggcctg

SEQ ID NO: 2880 - RNA, 22 nt, synthetic construct
  source 1..22: mol_type = other RNA
tgctcaagaggaggcaagctgg

SEQ ID NO: 2881 - RNA, 22 nt, synthetic construct
  source 1..22: mol_type = other RNA
tgctgactgctcaagaggaggc

SEQ ID NO: 2882 - RNA, 22 nt, synthetic construct
  source 1..22: mol_type = other RNA
tgctgcatggcagctggtgagt

SEQ ID NO: 2883 - RNA, 22 nt, synthetic construct
  source 1..22: mol_type = other RNA
tgctggggctggcctgactcac

SEQ ID NO: 2884 - RNA, 22 nt, synthetic construct
  source 1..22: mol_type = other RNA
tgctgtccacccagtagatctg

SEQ ID NO: 2885 - RNA, 22 nt, synthetic construct
  source 1..22: mol_type = other RNA
tgctgtggttccctctcttctt

SEQ ID NO: 2886 - RNA, 22 nt, synthetic construct
  source 1..22: mol_type = other RNA
tggaaactctataagagagatc

SEQ ID NO: 2887 - RNA, 22 nt, synthetic construct
  source 1..22: mol_type = other RNA
tggaagagctgaaacatcccca

SEQ ID NO: 2888 - RNA, 22 nt, synthetic construct
  source 1..22: mol_type = other RNA
tggacagcagtgccagctctcc

SEQ ID NO: 2889 - RNA, 22 nt, synthetic construct
  source 1..22: mol_type = other RNA
tggacagggaagaactgtgcct

SEQ ID NO: 2890 - RNA, 22 nt, synthetic construct
  source 1..22: mol_type = other RNA
tggaggcagtggtggcggcggc

SEQ ID NO: 2891 - RNA, 22 nt, synthetic construct
  source 1..22: mol_type = other RNA
tggaggggcccagggagagctg

SEQ ID NO: 2892 - RNA, 22 nt, synthetic construct
  source 1..22: mol_type = other RNA
tggatctctcttatagagtttc

SEQ ID NO: 2893 - RNA, 22 nt, synthetic construct
  source 1..22: mol_type = other RNA
tggcactgctgtccacccagta

SEQ ID NO: 2894 - RNA, 22 nt, synthetic construct
  source 1..22: mol_type = other RNA
tggcagaactccgagaggtaag

SEQ ID NO: 2895 - RNA, 22 nt, synthetic construct
  source 1..22: mol_type = other RNA
tggcagcggtagtggaggcagt

SEQ ID NO: 2896 - RNA, 22 nt, synthetic construct
  source 1..22: mol_type = other RNA
tggcagctggtgagtcaggcca

SEQ ID NO: 2897 - RNA, 22 nt, synthetic construct
  source 1..22: mol_type = other RNA
tggcctcctttgaccaggcctt

SEQ ID NO: 2898 - RNA, 22 nt, synthetic construct
  source 1..22: mol_type = other RNA
tggcctgactcaccagctgcca

SEQ ID NO: 2899 - RNA, 22 nt, synthetic construct
  source 1..22: mol_type = other RNA
tggcggtggcggtggtggtggt

SEQ ID NO: 2900 - RNA, 22 nt, synthetic construct
  source 1..22: mol_type = other RNA
tggcggtggtggtggtggcctc

SEQ ID NO: 2901 - RNA, 22 nt, synthetic construct
  source 1..22: mol_type = other RNA
tgggcacagaggttggacaggg

SEQ ID NO: 2902 - RNA, 22 nt, synthetic construct
  source 1..22: mol_type = other RNA
tgggcccctccaggcacagttc

SEQ ID NO: 2903 - RNA, 22 nt, synthetic construct
  source 1..22: mol_type = other RNA
tgggcctggggatgtttcagct

SEQ ID NO: 2904 - RNA, 22 nt, synthetic construct
  source 1..22: mol_type = other RNA
tggggatatgggtaattgaagg

SEQ ID NO: 2905 - RNA, 22 nt, synthetic construct
  source 1..22: mol_type = other RNA
tggggatgtttcagctcttcca

SEQ ID NO: 2906 - RNA, 22 nt, synthetic construct
  source 1..22: mol_type = other RNA
tggggctggcctgactcaccag

SEQ ID NO: 2907 - RNA, 22 nt, synthetic construct
  source 1..22: mol_type = other RNA
tgggtaattgaagggctgctgc

SEQ ID NO: 2908 - RNA, 22 nt, synthetic construct
  source 1..22: mol_type = other RNA
tgggtggacagcagtgccagct

SEQ ID NO: 2909 - RNA, 22 nt, synthetic construct
  source 1..22: mol_type = other RNA
tggtaggattgggcctggggat

SEQ ID NO: 2910 - RNA, 22 nt, synthetic construct
  source 1..22: mol_type = other RNA
tggtagtggtggcggtggcggt

SEQ ID NO: 2911 - RNA, 22 nt, synthetic construct
  source 1..22: mol_type = other RNA
tggtcaaaggaggccaccacca

SEQ ID NO: 2912 - RNA, 22 nt, synthetic construct
  source 1..22: mol_type = other RNA
tggtgagtcaggccagccccag

SEQ ID NO: 2913 - RNA, 22 nt, synthetic construct
  source 1..22: mol_type = other RNA
tggtgcctccagggcacagcag

SEQ ID NO: 2914 - RNA, 22 nt, synthetic construct
  source 1..22: mol_type = other RNA
tggtggcctcctttgaccaggc

SEQ ID NO: 2915 - RNA, 22 nt, synthetic construct
  source 1..22: mol_type = other RNA
tggtggcggtggcggtggtggt

SEQ ID NO: 2916 - RNA, 22 nt, synthetic construct
  source 1..22: mol_type = other RNA
tggtggtggcctcctttgacca

SEQ ID NO: 2917 - RNA, 22 nt, synthetic construct
  source 1..22: mol_type = other RNA
tggtggtggtggcctcctttga

SEQ ID NO: 2918 - RNA, 22 nt, synthetic construct
  source 1..22: mol_type = other RNA
tggttccctctcttcttcaggg

SEQ ID NO: 2919 - RNA, 22 nt, synthetic construct
  source 1..22: mol_type = other RNA
tggttctggttgccttggtagg

SEQ ID NO: 2920 - RNA, 22 nt, synthetic construct
  source 1..22: mol_type = other RNA
tggttgccttggtaggattggg

SEQ ID NO: 2921 - RNA, 22 nt, synthetic construct
  source 1..22: mol_type = other RNA
tgtagaggctgaggtgtcaagg

SEQ ID NO: 2922 - RNA, 22 nt, synthetic construct
  source 1..22: mol_type = other RNA
tgtaggtggaagagctgaaaca

SEQ ID NO: 2923 - RNA, 22 nt, synthetic construct
  source 1..22: mol_type = other RNA
tgtcaaggacgggaccctgttg

SEQ ID NO: 2924 - RNA, 22 nt, synthetic construct
  source 1..22: mol_type = other RNA
tgtccaacctctgtgcccagaa

SEQ ID NO: 2925 - RNA, 22 nt, synthetic construct
  source 1..22: mol_type = other RNA
tgtccacccagtagatctgggg

SEQ ID NO: 2926 - RNA, 22 nt, synthetic construct
  source 1..22: mol_type = other RNA
tgtctccttgtgatgtttttca

SEQ ID NO: 2927 - RNA, 22 nt, synthetic construct
  source 1..22: mol_type = other RNA
tgtgatgtttttcatggttctg

SEQ ID NO: 2928 - RNA, 22 nt, synthetic construct
  source 1..22: mol_type = other RNA
tgtgcccagaaggcctggtcaa

SEQ ID NO: 2929 - RNA, 22 nt, synthetic construct
  source 1..22: mol_type = other RNA
tgtgcctggaggggcccaggga

SEQ ID NO: 2930 - RNA, 22 nt, synthetic construct
  source 1..22: mol_type = other RNA
tgtgctgtggttccctctcttc

SEQ ID NO: 2931 - RNA, 22 nt, synthetic construct
  source 1..22: mol_type = other RNA
tgtggttccctctcttcttcag

SEQ ID NO: 2932 - RNA, 22 nt, synthetic construct
  source 1..22: mol_type = other RNA
tgtgtctccttgtgatgttttt

SEQ ID NO: 2933 - RNA, 22 nt, synthetic construct
  source 1..22: mol_type = other RNA
tgttgctgactgctcaagagga

SEQ ID NO: 2934 - RNA, 22 nt, synthetic construct
  source 1..22: mol_type = other RNA
tgtttcagctcttccacctaca

SEQ ID NO: 2935 - RNA, 22 nt, synthetic construct
  source 1..22: mol_type = other RNA
tgtttttcatggttctggttgc

SEQ ID NO: 2936 - RNA, 22 nt, synthetic construct
  source 1..22: mol_type = other RNA
ttacccatatccccagatctac

SEQ ID NO: 2937 - RNA, 22 nt, synthetic construct
  source 1..22: mol_type = other RNA
ttacctctcggagttctgccag

SEQ ID NO: 2938 - RNA, 22 nt, synthetic construct
  source 1..22: mol_type = other RNA
ttacttcttctcagtcctgtag

SEQ ID NO: 2939 - RNA, 22 nt, synthetic construct
  source 1..22: mol_type = other RNA
ttagctatggaaactctataag

SEQ ID NO: 2940 - RNA, 22 nt, synthetic construct
  source 1..22: mol_type = other RNA
ttcaattacccatatccccaga

SEQ ID NO: 2941 - RNA, 22 nt, synthetic construct
  source 1..22: mol_type = other RNA
ttcagctcttccacctacagaa

SEQ ID NO: 2942 - RNA, 22 nt, synthetic construct
  source 1..22: mol_type = other RNA
ttcaggggtggcagcggtagtg

SEQ ID NO: 2943 - RNA, 22 nt, synthetic construct
  source 1..22: mol_type = other RNA
ttcatggttctggttgccttgg

SEQ ID NO: 2944 - RNA, 22 nt, synthetic construct
  source 1..22: mol_type = other RNA
ttccacctacagaaggagctgg

SEQ ID NO: 2945 - RNA, 22 nt, synthetic construct
  source 1..22: mol_type = other RNA
ttccctctcttcttcaggggtg

SEQ ID NO: 2946 - RNA, 22 nt, synthetic construct
  source 1..22: mol_type = other RNA
ttccctgtccaacctctgtgcc

SEQ ID NO: 2947 - RNA, 22 nt, synthetic construct
  source 1..22: mol_type = other RNA
ttctcagtcctgtagaggctga

SEQ ID NO: 2948 - RNA, 22 nt, synthetic construct
  source 1..22: mol_type = other RNA
ttctgccagctccttctgtagg

SEQ ID NO: 2949 - RNA, 22 nt, synthetic construct
  source 1..22: mol_type = other RNA
ttctgggcacagaggttggaca

SEQ ID NO: 2950 - RNA, 22 nt, synthetic construct
  source 1..22: mol_type = other RNA
ttctggttgccttggtaggatt

SEQ ID NO: 2951 - RNA, 22 nt, synthetic construct
  source 1..22: mol_type = other RNA
ttctgtaggtggaagagctgaa

SEQ ID NO: 2952 - RNA, 22 nt, synthetic construct
  source 1..22: mol_type = other RNA
ttcttcaggggtggcagcggta

SEQ ID NO: 2953 - RNA, 22 nt, synthetic construct
  source 1..22: mol_type = other RNA
ttcttccctgtccaacctctgt

SEQ ID NO: 2954 - RNA, 22 nt, synthetic construct
  source 1..22: mol_type = other RNA
ttcttctcagtcctgtagaggc

SEQ ID NO: 2955 - RNA, 22 nt, synthetic construct
  source 1..22: mol_type = other RNA
ttgaagggctgctgcatggcag

SEQ ID NO: 2956 - RNA, 22 nt, synthetic construct
  source 1..22: mol_type = other RNA
ttgacacctcagcctctacagg

SEQ ID NO: 2957 - RNA, 22 nt, synthetic construct
  source 1..22: mol_type = other RNA
ttgaccaggccttctgggcaca

SEQ ID NO: 2958 - RNA, 22 nt, synthetic construct
  source 1..22: mol_type = other RNA
ttgagcagtcagcaacagggtc

SEQ ID NO: 2959 - RNA, 22 nt, synthetic construct
  source 1..22: mol_type = other RNA
ttgcctcctcttgagcagtcag

SEQ ID NO: 2960 - RNA, 22 nt, synthetic construct
  source 1..22: mol_type = other RNA
ttgccttggtaggattgggcct

SEQ ID NO: 2961 - RNA, 22 nt, synthetic construct
  source 1..22: mol_type = other RNA
ttgctgactgctcaagaggagg

SEQ ID NO: 2962 - RNA, 22 nt, synthetic construct
  source 1..22: mol_type = other RNA
ttgctggggctggcctgactca

SEQ ID NO: 2963 - RNA, 22 nt, synthetic construct
  source 1..22: mol_type = other RNA
ttggacagggaagaactgtgcc

SEQ ID NO: 2964 - RNA, 22 nt, synthetic construct
  source 1..22: mol_type = other RNA
ttgggcctggggatgtttcagc

SEQ ID NO: 2965 - RNA, 22 nt, synthetic construct
  source 1..22: mol_type = other RNA
ttggtaggattgggcctgggga

SEQ ID NO: 2966 - RNA, 22 nt, synthetic construct
  source 1..22: mol_type = other RNA
ttgtgatgtttttcatggttct

SEQ ID NO: 2967 - RNA, 22 nt, synthetic construct
  source 1..22: mol_type = other RNA
tttacttcttctcagtcctgta

SEQ ID NO: 2968 - RNA, 22 nt, synthetic construct
  source 1..22: mol_type = other RNA
tttcagctcttccacctacaga

SEQ ID NO: 2969 - RNA, 22 nt, synthetic construct
  source 1..22: mol_type = other RNA
tttcatggttctggttgccttg

SEQ ID NO: 2970 - RNA, 22 nt, synthetic construct
  source 1..22: mol_type = other RNA
tttgaccaggccttctgggcac

SEQ ID NO: 2971 - RNA, 22 nt, synthetic construct
  source 1..22: mol_type = other RNA
tttgctggggctggcctgactc

SEQ ID NO: 2972 - RNA, 22 nt, synthetic construct
  source 1..22: mol_type = other RNA
ttttacttcttctcagtcctgt

SEQ ID NO: 2973 - RNA, 22 nt, synthetic construct
  source 1..22: mol_type = other RNA
ttttcatggttctggttgcctt

SEQ ID NO: 2974 - RNA, 22 nt, synthetic construct
  source 1..22: mol_type = other RNA
tttttcatggttctggttgcct

SEQ ID NO: 2975 - RNA, 20 nt, synthetic construct
  source 1..20: mol_type = other RNA
aaaaaagactcacctatttg

SEQ ID NO: 2976 - RNA, 20 nt, synthetic construct
  source 1..20: mol_type = other RNA
aaaaagactcacctatttgc

SEQ ID NO: 2977 - RNA, 20 nt, synthetic construct
  source 1..20: mol_type = other RNA
aaaacagaaagagaaaagat

SEQ ID NO: 2978 - RNA, 20 nt, synthetic construct
  source 1..20: mol_type = other RNA
aaaagactcacctatttgct

SEQ ID NO: 2979 - RNA, 20 nt, synthetic construct
  source 1..20: mol_type = other RNA
aaacagaaagagaaaagatg

SEQ ID NO: 2980 - RNA, 20 nt, synthetic construct
  source 1..20: mol_type = other RNA
aaagactcacctatttgctt

SEQ ID NO: 2981 - RNA, 20 nt, synthetic construct
  source 1..20: mol_type = other RNA
aaagatgatgctgtgtgcat

SEQ ID NO: 2982 - RNA, 20 nt, synthetic construct
  source 1..20: mol_type = other RNA
aaataggtgagtcttttttc

SEQ ID NO: 2983 - RNA, 20 nt, synthetic construct
  source 1..20: mol_type = other RNA
aacagaaagagaaaagatgt

SEQ ID NO: 2984 - RNA, 20 nt, synthetic construct
  source 1..20: mol_type = other RNA
aactcaatgtacatgcgaaa

SEQ ID NO: 2985 - RNA, 20 nt, synthetic construct
  source 1..20: mol_type = other RNA
aagactcacctatttgcttc

SEQ ID NO: 2986 - RNA, 20 nt, synthetic construct
  source 1..20: mol_type = other RNA
aagatgatgctgtgtgcatc

SEQ ID NO: 2987 - RNA, 20 nt, synthetic construct
  source 1..20: mol_type = other RNA
aagcaaataggtgagtcttt

SEQ ID NO: 2988 - RNA, 20 nt, synthetic construct
  source 1..20: mol_type = other RNA
aataggtgagtcttttttcg

SEQ ID NO: 2989 - RNA, 20 nt, synthetic construct
  source 1..20: mol_type = other RNA
aatgtacatgcgaaaaaaga

SEQ ID NO: 2990 - RNA, 20 nt, synthetic construct
  source 1..20: mol_type = other RNA
acacagcatcatctttggag

SEQ ID NO: 2991 - RNA, 20 nt, synthetic construct
  source 1..20: mol_type = other RNA
acagaaagagaaaagatgta

SEQ ID NO: 2992 - RNA, 20 nt, synthetic construct
  source 1..20: mol_type = other RNA
acagcatcatctttggagaa

SEQ ID NO: 2993 - RNA, 20 nt, synthetic construct
  source 1..20: mol_type = other RNA
acatcttttctctttctgtt

SEQ ID NO: 2994 - RNA, 20 nt, synthetic construct
  source 1..20: mol_type = other RNA
acatgcgaaaaaagactcac

SEQ ID NO: 2995 - RNA, 20 nt, synthetic construct
  source 1..20: mol_type = other RNA
accagccagatgcacacagc

SEQ ID NO: 2996 - RNA, 20 nt, synthetic construct
  source 1..20: mol_type = other RNA
acctatttgcttctccaaag

SEQ ID NO: 2997 - RNA, 20 nt, synthetic construct
  source 1..20: mol_type = other RNA
actagtaaaacagaaagaga

SEQ ID NO: 2998 - RNA, 20 nt, synthetic construct
  source 1..20: mol_type = other RNA
actagtctaccagccagatg

SEQ ID NO: 2999 - RNA, 20 nt, synthetic construct
  source 1..20: mol_type = other RNA
actcaatgtacatgcgaaaa

SEQ ID NO: 3000 - RNA, 20 nt, synthetic construct
  source 1..20: mol_type = other RNA
actcacctatttgcttctcc

SEQ ID NO: 3001 - RNA, 20 nt, synthetic construct
  source 1..20: mol_type = other RNA
agaaagagaaaagatgtata

SEQ ID NO: 3002 - RNA, 20 nt, synthetic construct
  source 1..20: mol_type = other RNA
agaagcaaataggtgagtct

SEQ ID NO: 3003 - RNA, 20 nt, synthetic construct
  source 1..20: mol_type = other RNA
agactagtaaaacagaaaga

SEQ ID NO: 3004 - RNA, 20 nt, synthetic construct
  source 1..20: mol_type = other RNA
agactcacctatttgcttct

SEQ ID NO: 3005 - RNA, 20 nt, synthetic construct
  source 1..20: mol_type = other RNA
agatgatgctgtgtgcatct

SEQ ID NO: 3006 - RNA, 20 nt, synthetic construct
  source 1..20: mol_type = other RNA
agatgcacacagcatcatct

SEQ ID NO: 3007 - RNA, 20 nt, synthetic construct
  source 1..20: mol_type = other RNA
agcaaataggtgagtctttt

SEQ ID NO: 3008 - RNA, 20 nt, synthetic construct
  source 1..20: mol_type = other RNA
agcatcatctttggagaagc

SEQ ID NO: 3009 - RNA, 20 nt, synthetic construct
  source 1..20: mol_type = other RNA
agccagatgcacacagcatc

SEQ ID NO: 3010 - RNA, 20 nt, synthetic construct
  source 1..20: mol_type = other RNA
aggatcatctttgggaactc

SEQ ID NO: 3011 - RNA, 20 nt, synthetic construct
  source 1..20: mol_type = other RNA
aggtgagtcttttttcgcat

SEQ ID NO: 3012 - RNA, 20 nt, synthetic construct
  source 1..20: mol_type = other RNA
agtaaaacagaaagagaaaa

SEQ ID NO: 3013 - RNA, 20 nt, synthetic construct
  source 1..20: mol_type = other RNA
agtctaccagccagatgcac

SEQ ID NO: 3014 - RNA, 20 nt, synthetic construct
  source 1..20: mol_type = other RNA
agtcttttttcgcatgtaca

SEQ ID NO: 3015 - RNA, 20 nt, synthetic construct
  source 1..20: mol_type = other RNA
atacatcttttctctttctg

SEQ ID NO: 3016 - RNA, 20 nt, synthetic construct
  source 1..20: mol_type = other RNA
ataggtgagtcttttttcgc

SEQ ID NO: 3017 - RNA, 20 nt, synthetic construct
  source 1..20: mol_type = other RNA
atcatctttggagaagcaaa

SEQ ID NO: 3018 - RNA, 20 nt, synthetic construct
  source 1..20: mol_type = other RNA
atcatctttgggaactcaat

SEQ ID NO: 3019 - RNA, 20 nt, synthetic construct
  source 1..20: mol_type = other RNA
atctggctggtagactagta

SEQ ID NO: 3020 - RNA, 20 nt, synthetic construct
  source 1..20: mol_type = other RNA
atctttggagaagcaaatag

SEQ ID NO: 3021 - RNA, 20 nt, synthetic construct
  source 1..20: mol_type = other RNA
atctttgggaactcaatgta

SEQ ID NO: 3022 - RNA, 20 nt, synthetic construct
  source 1..20: mol_type = other RNA
atcttttctctttctgtttt

SEQ ID NO: 3023 - RNA, 20 nt, synthetic construct
  source 1..20: mol_type = other RNA
atgatgctgtgtgcatctgg

SEQ ID NO: 3024 - RNA, 20 nt, synthetic construct
  source 1..20: mol_type = other RNA
atgcacacagcatcatcttt

SEQ ID NO: 3025 - RNA, 20 nt, synthetic construct
  source 1..20: mol_type = other RNA
atgcgaaaaaagactcacct

SEQ ID NO: 3026 - RNA, 20 nt, synthetic construct
  source 1..20: mol_type = other RNA
atgctgtgtgcatctggctg

SEQ ID NO: 3027 - RNA, 20 nt, synthetic construct
  source 1..20: mol_type = other RNA
atgtacatgcgaaaaaagac

SEQ ID NO: 3028 - RNA, 20 nt, synthetic construct
  source 1..20: mol_type = other RNA
atgtacattgagttcccaaa

SEQ ID NO: 3029 - RNA, 20 nt, synthetic construct
  source 1..20: mol_type = other RNA
atttgcttctccaaagatga

SEQ ID NO: 3030 - RNA, 20 nt, synthetic construct
  source 1..20: mol_type = other RNA
caaagatgatgctgtgtgca

SEQ ID NO: 3031 - RNA, 20 nt, synthetic construct
  source 1..20: mol_type = other RNA
caaataggtgagtctttttt

SEQ ID NO: 3032 - RNA, 20 nt, synthetic construct
  source 1..20: mol_type = other RNA
caatgtacatgcgaaaaaag

SEQ ID NO: 3033 - RNA, 20 nt, synthetic construct
  source 1..20: mol_type = other RNA
cacacagcatcatctttgga

SEQ ID NO: 3034 - RNA, 20 nt, synthetic construct
  source 1..20: mol_type = other RNA
cacagcatcatctttggaga

SEQ ID NO: 3035 - RNA, 20 nt, synthetic construct
  source 1..20: mol_type = other RNA
cacctatttgcttctccaaa

SEQ ID NO: 3036 - RNA, 20 nt, synthetic construct
  source 1..20: mol_type = other RNA
cagaaagagaaaagatgtat

SEQ ID NO: 3037 - RNA, 20 nt, synthetic construct
  source 1..20: mol_type = other RNA
cagatgcacacagcatcatc

SEQ ID NO: 3038 - RNA, 20 nt, synthetic construct
  source 1..20: mol_type = other RNA
cagcatcatctttggagaag

SEQ ID NO: 3039 - RNA, 20 nt, synthetic construct
  source 1..20: mol_type = other RNA
cagccagatgcacacagcat

SEQ ID NO: 3040 - RNA, 20 nt, synthetic construct
  source 1..20: mol_type = other RNA
catcatctttggagaagcaa

SEQ ID NO: 3041 - RNA, 20 nt, synthetic construct
  source 1..20: mol_type = other RNA
catctggctggtagactagt

SEQ ID NO: 3042 - RNA, 20 nt, synthetic construct
  source 1..20: mol_type = other RNA
catctttggagaagcaaata

SEQ ID NO: 3043 - RNA, 20 nt, synthetic construct
  source 1..20: mol_type = other RNA
catctttgggaactcaatgt

SEQ ID NO: 3044 - RNA, 20 nt, synthetic construct
  source 1..20: mol_type = other RNA
catcttttctctttctgttt

SEQ ID NO: 3045 - RNA, 20 nt, synthetic construct
  source 1..20: mol_type = other RNA
catgcgaaaaaagactcacc

SEQ ID NO: 3046 - RNA, 20 nt, synthetic construct
  source 1..20: mol_type = other RNA
catgtacattgagttcccaa

SEQ ID NO: 3047 - RNA, 20 nt, synthetic construct
  source 1..20: mol_type = other RNA
ccaaagatgatgctgtgtgc

SEQ ID NO: 3048 - RNA, 20 nt, synthetic construct
  source 1..20: mol_type = other RNA
ccagatgcacacagcatcat

SEQ ID NO: 3049 - RNA, 20 nt, synthetic construct
  source 1..20: mol_type = other RNA
ccagccagatgcacacagca

SEQ ID NO: 3050 - RNA, 20 nt, synthetic construct
  source 1..20: mol_type = other RNA
cctatttgcttctccaaaga

SEQ ID NO: 3051 - RNA, 20 nt, synthetic construct
  source 1..20: mol_type = other RNA
cgaaaaaagactcacctatt

SEQ ID NO: 3052 - RNA, 20 nt, synthetic construct
  source 1..20: mol_type = other RNA
cgcatgtacattgagttccc

SEQ ID NO: 3053 - RNA, 20 nt, synthetic construct
  source 1..20: mol_type = other RNA
ctaccagccagatgcacaca

SEQ ID NO: 3054 - RNA, 20 nt, synthetic construct
  source 1..20: mol_type = other RNA
ctagtaaaacagaaagagaa

SEQ ID NO: 3055 - RNA, 20 nt, synthetic construct
  source 1..20: mol_type = other RNA
ctagtctaccagccagatgc

SEQ ID NO: 3056 - RNA, 20 nt, synthetic construct
  source 1..20: mol_type = other RNA
ctatttgcttctccaaagat

SEQ ID NO: 3057 - RNA, 20 nt, synthetic construct
  source 1..20: mol_type = other RNA
ctcaatgtacatgcgaaaaa

SEQ ID NO: 3058 - RNA, 20 nt, synthetic construct
  source 1..20: mol_type = other RNA
ctcacctatttgcttctcca

SEQ ID NO: 3059 - RNA, 20 nt, synthetic construct
  source 1..20: mol_type = other RNA
ctccaaagatgatgctgtgt

SEQ ID NO: 3060 - RNA, 20 nt, synthetic construct
  source 1..20: mol_type = other RNA
ctctttctgttttactagtc

SEQ ID NO: 3061 - RNA, 20 nt, synthetic construct
  source 1..20: mol_type = other RNA
ctggctggtagactagtaaa

SEQ ID NO: 3062 - RNA, 20 nt, synthetic construct
  source 1..20: mol_type = other RNA
ctggtagactagtaaaacag

SEQ ID NO: 3063 - RNA, 20 nt, synthetic construct
  source 1..20: mol_type = other RNA
ctgtgtgcatctggctggta

SEQ ID NO: 3064 - RNA, 20 nt, synthetic construct
  source 1..20: mol_type = other RNA
ctgttttactagtctaccag

SEQ ID NO: 3065 - RNA, 20 nt, synthetic construct
  source 1..20: mol_type = other RNA
cttctccaaagatgatgctg

SEQ ID NO: 3066 - RNA, 20 nt, synthetic construct
  source 1..20: mol_type = other RNA
ctttctgttttactagtcta

SEQ ID NO: 3067 - RNA, 20 nt, synthetic construct
  source 1..20: mol_type = other RNA
ctttggagaagcaaataggt

SEQ ID NO: 3068 - RNA, 20 nt, synthetic construct
  source 1..20: mol_type = other RNA
ctttgggaactcaatgtaca

SEQ ID NO: 3069 - RNA, 20 nt, synthetic construct
  source 1..20: mol_type = other RNA
cttttctctttctgttttac

SEQ ID NO: 3070 - RNA, 20 nt, synthetic construct
  source 1..20: mol_type = other RNA
cttttttcgcatgtacattg

SEQ ID NO: 3071 - RNA, 20 nt, synthetic construct
  source 1..20: mol_type = other RNA
gaaaaaagactcacctattt

SEQ ID NO: 3072 - RNA, 20 nt, synthetic construct
  source 1..20: mol_type = other RNA
gaaagagaaaagatgtataa

SEQ ID NO: 3073 - RNA, 20 nt, synthetic construct
  source 1..20: mol_type = other RNA
gaactcaatgtacatgcgaa

SEQ ID NO: 3074 - RNA, 20 nt, synthetic construct
  source 1..20: mol_type = other RNA
gaagcaaataggtgagtctt

SEQ ID NO: 3075 - RNA, 20 nt, synthetic construct
  source 1..20: mol_type = other RNA
gactagtaaaacagaaagag

SEQ ID NO: 3076 - RNA, 20 nt, synthetic construct
  source 1..20: mol_type = other RNA
gactcacctatttgcttctc

SEQ ID NO: 3077 - RNA, 20 nt, synthetic construct
  source 1..20: mol_type = other RNA
gagaagcaaataggtgagtc

SEQ ID NO: 3078 - RNA, 20 nt, synthetic construct
  source 1..20: mol_type = other RNA
gagtcttttttcgcatgtac

SEQ ID NO: 3079 - RNA, 20 nt, synthetic construct
  source 1..20: mol_type = other RNA
gatcatctttgggaactcaa

SEQ ID NO: 3080 - RNA, 20 nt, synthetic construct
  source 1..20: mol_type = other RNA
gatgatgctgtgtgcatctg

SEQ ID NO: 3081 - RNA, 20 nt, synthetic construct
  source 1..20: mol_type = other RNA
gatgcacacagcatcatctt

SEQ ID NO: 3082 - RNA, 20 nt, synthetic construct
  source 1..20: mol_type = other RNA
gatgctgtgtgcatctggct

SEQ ID NO: 3083 - RNA, 20 nt, synthetic construct
  source 1..20: mol_type = other RNA
gcaaataggtgagtcttttt

SEQ ID NO: 3084 - RNA, 20 nt, synthetic construct
  source 1..20: mol_type = other RNA
gcacacagcatcatctttgg

SEQ ID NO: 3085 - RNA, 20 nt, synthetic construct
  source 1..20: mol_type = other RNA
gcatcatctttggagaagca

SEQ ID NO: 3086 - RNA, 20 nt, synthetic construct
  source 1..20: mol_type = other RNA
gcatctggctggtagactag

SEQ ID NO: 3087 - RNA, 20 nt, synthetic construct
  source 1..20: mol_type = other RNA
gcatgtacattgagttccca

SEQ ID NO: 3088 - RNA, 20 nt, synthetic construct
  source 1..20: mol_type = other RNA
gccagatgcacacagcatca

SEQ ID NO: 3089 - RNA, 20 nt, synthetic construct
  source 1..20: mol_type = other RNA
gcgaaaaaagactcacctat

SEQ ID NO: 3090 - RNA, 20 nt, synthetic construct
  source 1..20: mol_type = other RNA
gctggtagactagtaaaaca

SEQ ID NO: 3091 - RNA, 20 nt, synthetic construct
  source 1..20: mol_type = other RNA
gctgtgtgcatctggctggt

SEQ ID NO: 3092 - RNA, 20 nt, synthetic construct
  source 1..20: mol_type = other RNA
gcttctccaaagatgatgct

SEQ ID NO: 3093 - RNA, 20 nt, synthetic construct
  source 1..20: mol_type = other RNA
ggaactcaatgtacatgcga

SEQ ID NO: 3094 - RNA, 20 nt, synthetic construct
  source 1..20: mol_type = other RNA
ggagaagcaaataggtgagt

SEQ ID NO: 3095 - RNA, 20 nt, synthetic construct
  source 1..20: mol_type = other RNA
ggatcatctttgggaactca

SEQ ID NO: 3096 - RNA, 20 nt, synthetic construct
  source 1..20: mol_type = other RNA
ggctggtagactagtaaaac

SEQ ID NO: 3097 - RNA, 20 nt, synthetic construct
  source 1..20: mol_type = other RNA
gggaactcaatgtacatgcg

SEQ ID NO: 3098 - RNA, 20 nt, synthetic construct
  source 1..20: mol_type = other RNA
ggtagactagtaaaacagaa

SEQ ID NO: 3099 - RNA, 20 nt, synthetic construct
  source 1..20: mol_type = other RNA
ggtgagtcttttttcgcatg

SEQ ID NO: 3100 - RNA, 20 nt, synthetic construct
  source 1..20: mol_type = other RNA
gtaaaacagaaagagaaaag

SEQ ID NO: 3101 - RNA, 20 nt, synthetic construct
  source 1..20: mol_type = other RNA
gtacatgcgaaaaaagactc

SEQ ID NO: 3102 - RNA, 20 nt, synthetic construct
  source 1..20: mol_type = other RNA
gtagactagtaaaacagaaa

SEQ ID NO: 3103 - RNA, 20 nt, synthetic construct
  source 1..20: mol_type = other RNA
gtctaccagccagatgcaca

SEQ ID NO: 3104 - RNA, 20 nt, synthetic construct
  source 1..20: mol_type = other RNA
gtcttttttcgcatgtacat

SEQ ID NO: 3105 - RNA, 20 nt, synthetic construct
  source 1..20: mol_type = other RNA
gtgagtcttttttcgcatgt

SEQ ID NO: 3106 - RNA, 20 nt, synthetic construct
  source 1..20: mol_type = other RNA
gtgcatctggctggtagact

SEQ ID NO: 3107 - RNA, 20 nt, synthetic construct
  source 1..20: mol_type = other RNA
gtgtgcatctggctggtaga

SEQ ID NO: 3108 - RNA, 20 nt, synthetic construct
  source 1..20: mol_type = other RNA
gttttactagtctaccagcc

SEQ ID NO: 3109 - RNA, 20 nt, synthetic construct
  source 1..20: mol_type = other RNA
taaaacagaaagagaaaaga

SEQ ID NO: 3110 - RNA, 20 nt, synthetic construct
  source 1..20: mol_type = other RNA
tacatcttttctctttctgt

SEQ ID NO: 3111 - RNA, 20 nt, synthetic construct
  source 1..20: mol_type = other RNA
tacatgcgaaaaaagactca

SEQ ID NO: 3112 - RNA, 20 nt, synthetic construct
  source 1..20: mol_type = other RNA
taccagccagatgcacacag

SEQ ID NO: 3113 - RNA, 20 nt, synthetic construct
  source 1..20: mol_type = other RNA
tactagtctaccagccagat

SEQ ID NO: 3114 - RNA, 20 nt, synthetic construct
  source 1..20: mol_type = other RNA
tagactagtaaaacagaaag

SEQ ID NO: 3115 - RNA, 20 nt, synthetic construct
  source 1..20: mol_type = other RNA
taggtgagtcttttttcgca

SEQ ID NO: 3116 - RNA, 20 nt, synthetic construct
  source 1..20: mol_type = other RNA
tagtaaaacagaaagagaaa

SEQ ID NO: 3117 - RNA, 20 nt, synthetic construct
  source 1..20: mol_type = other RNA
tagtctaccagccagatgca

SEQ ID NO: 3118 - RNA, 20 nt, synthetic construct
  source 1..20: mol_type = other RNA
tatacatcttttctctttct

SEQ ID NO: 3119 - RNA, 20 nt, synthetic construct
  source 1..20: mol_type = other RNA
tatttgcttctccaaagatg

SEQ ID NO: 3120 - RNA, 20 nt, synthetic construct
  source 1..20: mol_type = other RNA
tcaatgtacatgcgaaaaaa

SEQ ID NO: 3121 - RNA, 20 nt, synthetic construct
  source 1..20: mol_type = other RNA
tcacctatttgcttctccaa

SEQ ID NO: 3122 - RNA, 20 nt, synthetic construct
  source 1..20: mol_type = other RNA
tcatctttggagaagcaaat

SEQ ID NO: 3123 - RNA, 20 nt, synthetic construct
  source 1..20: mol_type = other RNA
tcatctttgggaactcaatg

SEQ ID NO: 3124 - RNA, 20 nt, synthetic construct
  source 1..20: mol_type = other RNA
tccaaagatgatgctgtgtg

SEQ ID NO: 3125 - RNA, 20 nt, synthetic construct
  source 1..20: mol_type = other RNA
tcgcatgtacattgagttcc

SEQ ID NO: 3126 - RNA, 20 nt, synthetic construct
  source 1..20: mol_type = other RNA
tctaccagccagatgcacac

SEQ ID NO: 3127 - RNA, 20 nt, synthetic construct
  source 1..20: mol_type = other RNA
tctccaaagatgatgctgtg

SEQ ID NO: 3128 - RNA, 20 nt, synthetic construct
  source 1..20: mol_type = other RNA
tctctttctgttttactagt

SEQ ID NO: 3129 - RNA, 20 nt, synthetic construct
  source 1..20: mol_type = other RNA
tctggctggtagactagtaa

SEQ ID NO: 3130 - RNA, 20 nt, synthetic construct
  source 1..20: mol_type = other RNA
tctgttttactagtctacca

SEQ ID NO: 3131 - RNA, 20 nt, synthetic construct
  source 1..20: mol_type = other RNA
tctttctgttttactagtct

SEQ ID NO: 3132 - RNA, 20 nt, synthetic construct
  source 1..20: mol_type = other RNA
tctttggagaagcaaatagg

SEQ ID NO: 3133 - RNA, 20 nt, synthetic construct
  source 1..20: mol_type = other RNA
tctttgggaactcaatgtac

SEQ ID NO: 3134 - RNA, 20 nt, synthetic construct
  source 1..20: mol_type = other RNA
tcttttctctttctgtttta

SEQ ID NO: 3135 - RNA, 20 nt, synthetic construct
  source 1..20: mol_type = other RNA
tcttttttcgcatgtacatt

SEQ ID NO: 3136 - RNA, 20 nt, synthetic construct
  source 1..20: mol_type = other RNA
tgagtcttttttcgcatgta

SEQ ID NO: 3137 - RNA, 20 nt, synthetic construct
  source 1..20: mol_type = other RNA
tgatgctgtgtgcatctggc

SEQ ID NO: 3138 - RNA, 20 nt, synthetic construct
  source 1..20: mol_type = other RNA
tgcacacagcatcatctttg

SEQ ID NO: 3139 - RNA, 20 nt, synthetic construct
  source 1..20: mol_type = other RNA
tgcatctggctggtagacta

SEQ ID NO: 3140 - RNA, 20 nt, synthetic construct
  source 1..20: mol_type = other RNA
tgcgaaaaaagactcaccta

SEQ ID NO: 3141 - RNA, 20 nt, synthetic construct
  source 1..20: mol_type = other RNA
tgctgtgtgcatctggctgg

SEQ ID NO: 3142 - RNA, 20 nt, synthetic construct
  source 1..20: mol_type = other RNA
tgcttctccaaagatgatgc

SEQ ID NO: 3143 - RNA, 20 nt, synthetic construct
  source 1..20: mol_type = other RNA
tggagaagcaaataggtgag

SEQ ID NO: 3144 - RNA, 20 nt, synthetic construct
  source 1..20: mol_type = other RNA
tggctggtagactagtaaaa

SEQ ID NO: 3145 - RNA, 20 nt, synthetic construct
  source 1..20: mol_type = other RNA
tgggaactcaatgtacatgc

SEQ ID NO: 3146 - RNA, 20 nt, synthetic construct
  source 1..20: mol_type = other RNA
tggtagactagtaaaacaga

SEQ ID NO: 3147 - RNA, 20 nt, synthetic construct
  source 1..20: mol_type = other RNA
tgtacatgcgaaaaaagact

SEQ ID NO: 3148 - RNA, 20 nt, synthetic construct
  source 1..20: mol_type = other RNA
tgtacattgagttcccaaag

SEQ ID NO: 3149 - RNA, 20 nt, synthetic construct
  source 1..20: mol_type = other RNA
tgtgcatctggctggtagac

SEQ ID NO: 3150 - RNA, 20 nt, synthetic construct
  source 1..20: mol_type = other RNA
tgtgtgcatctggctggtag

SEQ ID NO: 3151 - RNA, 20 nt, synthetic construct
  source 1..20: mol_type = other RNA
tgttttactagtctaccagc

SEQ ID NO: 3152 - RNA, 20 nt, synthetic construct
  source 1..20: mol_type = other RNA
ttactagtctaccagccaga

SEQ ID NO: 3153 - RNA, 20 nt, synthetic construct
  source 1..20: mol_type = other RNA
ttatacatcttttctctttc

SEQ ID NO: 3154 - RNA, 20 nt, synthetic construct
  source 1..20: mol_type = other RNA
ttcgcatgtacattgagttc

SEQ ID NO: 3155 - RNA, 20 nt, synthetic construct
  source 1..20: mol_type = other RNA
ttctccaaagatgatgctgt

SEQ ID NO: 3156 - RNA, 20 nt, synthetic construct
  source 1..20: mol_type = other RNA
ttctctttctgttttactag

SEQ ID NO: 3157 - RNA, 20 nt, synthetic construct
  source 1..20: mol_type = other RNA
ttctgttttactagtctacc

SEQ ID NO: 3158 - RNA, 20 nt, synthetic construct
  source 1..20: mol_type = other RNA
ttgcttctccaaagatgatg

SEQ ID NO: 3159 - RNA, 20 nt, synthetic construct
  source 1..20: mol_type = other RNA
ttggagaagcaaataggtga

SEQ ID NO: 3160 - RNA, 20 nt, synthetic construct
  source 1..20: mol_type = other RNA
ttgggaactcaatgtacatg

SEQ ID NO: 3161 - RNA, 20 nt, synthetic construct
  source 1..20: mol_type = other RNA
tttactagtctaccagccag

SEQ ID NO: 3162 - RNA, 20 nt, synthetic construct
  source 1..20: mol_type = other RNA
tttcgcatgtacattgagtt

SEQ ID NO: 3163 - RNA, 20 nt, synthetic construct
  source 1..20: mol_type = other RNA
tttctctttctgttttacta

SEQ ID NO: 3164 - RNA, 20 nt, synthetic construct
  source 1..20: mol_type = other RNA
tttctgttttactagtctac

SEQ ID NO: 3165 - RNA, 20 nt, synthetic construct
  source 1..20: mol_type = other RNA
tttgcttctccaaagatgat

SEQ ID NO: 3166 - RNA, 20 nt, synthetic construct
  source 1..20: mol_type = other RNA
tttggagaagcaaataggtg

SEQ ID NO: 3167 - RNA, 20 nt, synthetic construct
  source 1..20: mol_type = other RNA
tttgggaactcaatgtacat

SEQ ID NO: 3168 - RNA, 20 nt, synthetic construct
  source 1..20: mol_type = other RNA
ttttactagtctaccagcca

SEQ ID NO: 3169 - RNA, 20 nt, synthetic construct
  source 1..20: mol_type = other RNA
ttttcgcatgtacattgagt

SEQ ID NO: 3170 - RNA, 20 nt, synthetic construct
  source 1..20: mol_type = other RNA
ttttctctttctgttttact

SEQ ID NO: 3171 - RNA, 20 nt, synthetic construct
  source 1..20: mol_type = other RNA
tttttcgcatgtacattgag

SEQ ID NO: 3172 - RNA, 20 nt, synthetic construct
  source 1..20: mol_type = other RNA
ttttttcgcatgtacattga

SEQ ID NO: 3173 - RNA, 21 nt, synthetic construct
  source 1..21: mol_type = other RNA
aaaaaagactcacctatttgc

SEQ ID NO: 3174 - RNA, 21 nt, synthetic construct
  source 1..21: mol_type = other RNA
aaaaagactcacctatttgct

SEQ ID NO: 3175 - RNA, 21 nt, synthetic construct
  source 1..21: mol_type = other RNA
aaaacagaaagagaaaagatg

SEQ ID NO: 3176 - RNA, 21 nt, synthetic construct
  source 1..21: mol_type = other RNA
aaaagactcacctatttgctt

SEQ ID NO: 3177 - RNA, 21 nt, synthetic construct
  source 1..21: mol_type = other RNA
aaacagaaagagaaaagatgt

SEQ ID NO: 3178 - RNA, 21 nt, synthetic construct
  source 1..21: mol_type = other RNA
aaagactcacctatttgcttc

SEQ ID NO: 3179 - RNA, 21 nt, synthetic construct
  source 1..21: mol_type = other RNA
aaagatgatgctgtgtgcatc

SEQ ID NO: 3180 - RNA, 21 nt, synthetic construct
  source 1..21: mol_type = other RNA
aaataggtgagtcttttttcg

SEQ ID NO: 3181 - RNA, 21 nt, synthetic construct
  source 1..21: mol_type = other RNA
aacagaaagagaaaagatgta

SEQ ID NO: 3182 - RNA, 21 nt, synthetic construct
  source 1..21: mol_type = other RNA
aactcaatgtacatgcgaaaa

SEQ ID NO: 3183 - RNA, 21 nt, synthetic construct
  source 1..21: mol_type = other RNA
aagactcacctatttgcttct

SEQ ID NO: 3184 - RNA, 21 nt, synthetic construct
  source 1..21: mol_type = other RNA
aagatgatgctgtgtgcatct

SEQ ID NO: 3185 - RNA, 21 nt, synthetic construct
  source 1..21: mol_type = other RNA
aagcaaataggtgagtctttt

SEQ ID NO: 3186 - RNA, 21 nt, synthetic construct
  source 1..21: mol_type = other RNA
aataggtgagtcttttttcgc

SEQ ID NO: 3187 - RNA, 21 nt, synthetic construct
  source 1..21: mol_type = other RNA
aatgtacatgcgaaaaaagac

SEQ ID NO: 3188 - RNA, 21 nt, synthetic construct
  source 1..21: mol_type = other RNA
acacagcatcatctttggaga

SEQ ID NO: 3189 - RNA, 21 nt, synthetic construct
  source 1..21: mol_type = other RNA
acagaaagagaaaagatgtat

SEQ ID NO: 3190 - RNA, 21 nt, synthetic construct
  source 1..21: mol_type = other RNA
acagcatcatctttggagaag

SEQ ID NO: 3191 - RNA, 21 nt, synthetic construct
  source 1..21: mol_type = other RNA
acatcttttctctttctgttt

SEQ ID NO: 3192 - RNA, 21 nt, synthetic construct
  source 1..21: mol_type = other RNA
acatgcgaaaaaagactcacc

SEQ ID NO: 3193 - RNA, 21 nt, synthetic construct
  source 1..21: mol_type = other RNA
accagccagatgcacacagca

SEQ ID NO: 3194 - RNA, 21 nt, synthetic construct
  source 1..21: mol_type = other RNA
acctatttgcttctccaaaga

SEQ ID NO: 3195 - RNA, 21 nt, synthetic construct
  source 1..21: mol_type = other RNA
actagtaaaacagaaagagaa

SEQ ID NO: 3196 - RNA, 21 nt, synthetic construct
  source 1..21: mol_type = other RNA
actagtctaccagccagatgc

SEQ ID NO: 3197 - RNA, 21 nt, synthetic construct
  source 1..21: mol_type = other RNA
actcaatgtacatgcgaaaaa

SEQ ID NO: 3198 - RNA, 21 nt, synthetic construct
  source 1..21: mol_type = other RNA
actcacctatttgcttctcca

SEQ ID NO: 3199 - RNA, 21 nt, synthetic construct
  source 1..21: mol_type = other RNA
agaagcaaataggtgagtctt

SEQ ID NO: 3200 - RNA, 21 nt, synthetic construct
  source 1..21: mol_type = other RNA
agactagtaaaacagaaagag

SEQ ID NO: 3201 - RNA, 21 nt, synthetic construct
  source 1..21: mol_type = other RNA
agactcacctatttgcttctc

SEQ ID NO: 3202 - RNA, 21 nt, synthetic construct
  source 1..21: mol_type = other RNA
agatgatgctgtgtgcatctg

SEQ ID NO: 3203 - RNA, 21 nt, synthetic construct
  source 1..21: mol_type = other RNA
agatgcacacagcatcatctt

SEQ ID NO: 3204 - RNA, 21 nt, synthetic construct
  source 1..21: mol_type = other RNA
agcaaataggtgagtcttttt

SEQ ID NO: 3205 - RNA, 21 nt, synthetic construct
  source 1..21: mol_type = other RNA
agcatcatctttggagaagca

SEQ ID NO: 3206 - RNA, 21 nt, synthetic construct
  source 1..21: mol_type = other RNA
agccagatgcacacagcatca

SEQ ID NO: 3207 - RNA, 21 nt, synthetic construct
  source 1..21: mol_type = other RNA
aggatcatctttgggaactca

SEQ ID NO: 3208 - RNA, 21 nt, synthetic construct
  source 1..21: mol_type = other RNA
aggtgagtcttttttcgcatg

SEQ ID NO: 3209 - RNA, 21 nt, synthetic construct
  source 1..21: mol_type = other RNA
agtaaaacagaaagagaaaag

SEQ ID NO: 3210 - RNA, 21 nt, synthetic construct
  source 1..21: mol_type = other RNA
agtctaccagccagatgcaca

SEQ ID NO: 3211 - RNA, 21 nt, synthetic construct
  source 1..21: mol_type = other RNA
agtcttttttcgcatgtacat

SEQ ID NO: 3212 - RNA, 21 nt, synthetic construct
  source 1..21: mol_type = other RNA
atacatcttttctctttctgt

SEQ ID NO: 3213 - RNA, 21 nt, synthetic construct
  source 1..21: mol_type = other RNA
ataggtgagtcttttttcgca

SEQ ID NO: 3214 - RNA, 21 nt, synthetic construct
  source 1..21: mol_type = other RNA
atcatctttggagaagcaaat

SEQ ID NO: 3215 - RNA, 21 nt, synthetic construct
  source 1..21: mol_type = other RNA
atcatctttgggaactcaatg

SEQ ID NO: 3216 - RNA, 21 nt, synthetic construct
  source 1..21: mol_type = other RNA
atctggctggtagactagtaa

SEQ ID NO: 3217 - RNA, 21 nt, synthetic construct
  source 1..21: mol_type = other RNA
atctttggagaagcaaatagg

SEQ ID NO: 3218 - RNA, 21 nt, synthetic construct
  source 1..21: mol_type = other RNA
atctttgggaactcaatgtac

SEQ ID NO: 3219 - RNA, 21 nt, synthetic construct
  source 1..21: mol_type = other RNA
atgatgctgtgtgcatctggc

SEQ ID NO: 3220 - RNA, 21 nt, synthetic construct
  source 1..21: mol_type = other RNA
atgcacacagcatcatctttg

SEQ ID NO: 3221 - RNA, 21 nt, synthetic construct
  source 1..21: mol_type = other RNA
atgcgaaaaaagactcaccta

SEQ ID NO: 3222 - RNA, 21 nt, synthetic construct
  source 1..21: mol_type = other RNA
atgctgtgtgcatctggctgg

SEQ ID NO: 3223 - RNA, 21 nt, synthetic construct
  source 1..21: mol_type = other RNA
atgtacatgcgaaaaaagact

SEQ ID NO: 3224 - RNA, 21 nt, synthetic construct
  source 1..21: mol_type = other RNA
atgtacattgagttcccaaag

SEQ ID NO: 3225 - RNA, 21 nt, synthetic construct
  source 1..21: mol_type = other RNA
atttgcttctccaaagatgat

SEQ ID NO: 3226 - RNA, 21 nt, synthetic construct
  source 1..21: mol_type = other RNA
caaagatgatgctgtgtgcat

SEQ ID NO: 3227 - RNA, 21 nt, synthetic construct
  source 1..21: mol_type = other RNA
caaataggtgagtcttttttc

SEQ ID NO: 3228 - RNA, 21 nt, synthetic construct
  source 1..21: mol_type = other RNA
caatgtacatgcgaaaaaaga

SEQ ID NO: 3229 - RNA, 21 nt, synthetic construct
  source 1..21: mol_type = other RNA
cacacagcatcatctttggag

SEQ ID NO: 3230 - RNA, 21 nt, synthetic construct
  source 1..21: mol_type = other RNA
cacagcatcatctttggagaa

SEQ ID NO: 3231 - RNA, 21 nt, synthetic construct
  source 1..21: mol_type = other RNA
cacctatttgcttctccaaag

SEQ ID NO: 3232 - RNA, 21 nt, synthetic construct
  source 1..21: mol_type = other RNA
cagaaagagaaaagatgtata

SEQ ID NO: 3233 - RNA, 21 nt, synthetic construct
  source 1..21: mol_type = other RNA
cagatgcacacagcatcatct

SEQ ID NO: 3234 - RNA, 21 nt, synthetic construct
  source 1..21: mol_type = other RNA
cagcatcatctttggagaagc

SEQ ID NO: 3235 - RNA, 21 nt, synthetic construct
  source 1..21: mol_type = other RNA
cagccagatgcacacagcatc

SEQ ID NO: 3236 - RNA, 21 nt, synthetic construct
  source 1..21: mol_type = other RNA
catcatctttggagaagcaaa

SEQ ID NO: 3237 - RNA, 21 nt, synthetic construct
  source 1..21: mol_type = other RNA
catctggctggtagactagta

SEQ ID NO: 3238 - RNA, 21 nt, synthetic construct
  source 1..21: mol_type = other RNA
catctttggagaagcaaatag

SEQ ID NO: 3239 - RNA, 21 nt, synthetic construct
  source 1..21: mol_type = other RNA
catctttgggaactcaatgta

SEQ ID NO: 3240 - RNA, 21 nt, synthetic construct
  source 1..21: mol_type = other RNA
catcttttctctttctgtttt

SEQ ID NO: 3241 - RNA, 21 nt, synthetic construct
  source 1..21: mol_type = other RNA
catgcgaaaaaagactcacct

SEQ ID NO: 3242 - RNA, 21 nt, synthetic construct
  source 1..21: mol_type = other RNA
catgtacattgagttcccaaa

SEQ ID NO: 3243 - RNA, 21 nt, synthetic construct
  source 1..21: mol_type = other RNA
ccaaagatgatgctgtgtgca

SEQ ID NO: 3244 - RNA, 21 nt, synthetic construct
  source 1..21: mol_type = other RNA
ccagatgcacacagcatcatc

SEQ ID NO: 3245 - RNA, 21 nt, synthetic construct
  source 1..21: mol_type = other RNA
ccagccagatgcacacagcat

SEQ ID NO: 3246 - RNA, 21 nt, synthetic construct
  source 1..21: mol_type = other RNA
cctatttgcttctccaaagat

SEQ ID NO: 3247 - RNA, 21 nt, synthetic construct
  source 1..21: mol_type = other RNA
cgaaaaaagactcacctattt

SEQ ID NO: 3248 - RNA, 21 nt, synthetic construct
  source 1..21: mol_type = other RNA
cgcatgtacattgagttccca

SEQ ID NO: 3249 - RNA, 21 nt, synthetic construct
  source 1..21: mol_type = other RNA
ctaccagccagatgcacacag

SEQ ID NO: 3250 - RNA, 21 nt, synthetic construct
  source 1..21: mol_type = other RNA
ctagtaaaacagaaagagaaa

SEQ ID NO: 3251 - RNA, 21 nt, synthetic construct
  source 1..21: mol_type = other RNA
ctagtctaccagccagatgca

SEQ ID NO: 3252 - RNA, 21 nt, synthetic construct
  source 1..21: mol_type = other RNA
ctatttgcttctccaaagatg

SEQ ID NO: 3253 - RNA, 21 nt, synthetic construct
  source 1..21: mol_type = other RNA
ctcaatgtacatgcgaaaaaa

SEQ ID NO: 3254 - RNA, 21 nt, synthetic construct
  source 1..21: mol_type = other RNA
ctcacctatttgcttctccaa

SEQ ID NO: 3255 - RNA, 21 nt, synthetic construct
  source 1..21: mol_type = other RNA
ctccaaagatgatgctgtgtg

SEQ ID NO: 3256 - RNA, 21 nt, synthetic construct
  source 1..21: mol_type = other RNA
ctctttctgttttactagtct

SEQ ID NO: 3257 - RNA, 21 nt, synthetic construct
  source 1..21: mol_type = other RNA
ctggctggtagactagtaaaa

SEQ ID NO: 3258 - RNA, 21 nt, synthetic construct
  source 1..21: mol_type = other RNA
ctggtagactagtaaaacaga

SEQ ID NO: 3259 - RNA, 21 nt, synthetic construct
  source 1..21: mol_type = other RNA
ctgtgtgcatctggctggtag

SEQ ID NO: 3260 - RNA, 21 nt, synthetic construct
  source 1..21: mol_type = other RNA
ctgttttactagtctaccagc

SEQ ID NO: 3261 - RNA, 21 nt, synthetic construct
  source 1..21: mol_type = other RNA
cttctccaaagatgatgctgt

SEQ ID NO: 3262 - RNA, 21 nt, synthetic construct
  source 1..21: mol_type = other RNA
ctttctgttttactagtctac

SEQ ID NO: 3263 - RNA, 21 nt, synthetic construct
  source 1..21: mol_type = other RNA
ctttggagaagcaaataggtg

SEQ ID NO: 3264 - RNA, 21 nt, synthetic construct
  source 1..21: mol_type = other RNA
ctttgggaactcaatgtacat

SEQ ID NO: 3265 - RNA, 21 nt, synthetic construct
  source 1..21: mol_type = other RNA
cttttctctttctgttttact

SEQ ID NO: 3266 - RNA, 21 nt, synthetic construct
  source 1..21: mol_type = other RNA
cttttttcgcatgtacattga

SEQ ID NO: 3267 - RNA, 21 nt, synthetic construct
  source 1..21: mol_type = other RNA
gaaaaaagactcacctatttg

SEQ ID NO: 3268 - RNA, 21 nt, synthetic construct
  source 1..21: mol_type = other RNA
gaactcaatgtacatgcgaaa

SEQ ID NO: 3269 - RNA, 21 nt, synthetic construct
  source 1..21: mol_type = other RNA
gaagcaaataggtgagtcttt

SEQ ID NO: 3270 - RNA, 21 nt, synthetic construct
  source 1..21: mol_type = other RNA
gactagtaaaacagaaagaga

SEQ ID NO: 3271 - RNA, 21 nt, synthetic construct
  source 1..21: mol_type = other RNA
gactcacctatttgcttctcc

SEQ ID NO: 3272 - RNA, 21 nt, synthetic construct
  source 1..21: mol_type = other RNA
gagaagcaaataggtgagtct

SEQ ID NO: 3273 - RNA, 21 nt, synthetic construct
  source 1..21: mol_type = other RNA
gagtcttttttcgcatgtaca

SEQ ID NO: 3274 - RNA, 21 nt, synthetic construct
  source 1..21: mol_type = other RNA
gatcatctttgggaactcaat

SEQ ID NO: 3275 - RNA, 21 nt, synthetic construct
  source 1..21: mol_type = other RNA
gatgatgctgtgtgcatctgg

SEQ ID NO: 3276 - RNA, 21 nt, synthetic construct
  source 1..21: mol_type = other RNA
gatgcacacagcatcatcttt

SEQ ID NO: 3277 - RNA, 21 nt, synthetic construct
  source 1..21: mol_type = other RNA
gatgctgtgtgcatctggctg

SEQ ID NO: 3278 - RNA, 21 nt, synthetic construct
  source 1..21: mol_type = other RNA
gcaaataggtgagtctttttt

SEQ ID NO: 3279 - RNA, 21 nt, synthetic construct
  source 1..21: mol_type = other RNA
gcacacagcatcatctttgga

SEQ ID NO: 3280 - RNA, 21 nt, synthetic construct
  source 1..21: mol_type = other RNA
gcatcatctttggagaagcaa

SEQ ID NO: 3281 - RNA, 21 nt, synthetic construct
  source 1..21: mol_type = other RNA
gcatctggctggtagactagt

SEQ ID NO: 3282 - RNA, 21 nt, synthetic construct
  source 1..21: mol_type = other RNA
gcatgtacattgagttcccaa

SEQ ID NO: 3283 - RNA, 21 nt, synthetic construct
  source 1..21: mol_type = other RNA
gccagatgcacacagcatcat

SEQ ID NO: 3284 - RNA, 21 nt, synthetic construct
  source 1..21: mol_type = other RNA
gcgaaaaaagactcacctatt

SEQ ID NO: 3285 - RNA, 21 nt, synthetic construct
  source 1..21: mol_type = other RNA
gctggtagactagtaaaacag

SEQ ID NO: 3286 - RNA, 21 nt, synthetic construct
  source 1..21: mol_type = other RNA
gctgtgtgcatctggctggta

SEQ ID NO: 3287 - RNA, 21 nt, synthetic construct
  source 1..21: mol_type = other RNA
gcttctccaaagatgatgctg

SEQ ID NO: 3288 - RNA, 21 nt, synthetic construct
  source 1..21: mol_type = other RNA
ggaactcaatgtacatgcgaa

SEQ ID NO: 3289 - RNA, 21 nt, synthetic construct
  source 1..21: mol_type = other RNA
ggagaagcaaataggtgagtc

SEQ ID NO: 3290 - RNA, 21 nt, synthetic construct
  source 1..21: mol_type = other RNA
ggatcatctttgggaactcaa

SEQ ID NO: 3291 - RNA, 21 nt, synthetic construct
  source 1..21: mol_type = other RNA
ggctggtagactagtaaaaca

SEQ ID NO: 3292 - RNA, 21 nt, synthetic construct
  source 1..21: mol_type = other RNA
gggaactcaatgtacatgcga

SEQ ID NO: 3293 - RNA, 21 nt, synthetic construct
  source 1..21: mol_type = other RNA
ggtagactagtaaaacagaaa

SEQ ID NO: 3294 - RNA, 21 nt, synthetic construct
  source 1..21: mol_type = other RNA
ggtgagtcttttttcgcatgt

SEQ ID NO: 3295 - RNA, 21 nt, synthetic construct
  source 1..21: mol_type = other RNA
gtaaaacagaaagagaaaaga

SEQ ID NO: 3296 - RNA, 21 nt, synthetic construct
  source 1..21: mol_type = other RNA
gtacatgcgaaaaaagactca

SEQ ID NO: 3297 - RNA, 21 nt, synthetic construct
  source 1..21: mol_type = other RNA
gtagactagtaaaacagaaag

SEQ ID NO: 3298 - RNA, 21 nt, synthetic construct
  source 1..21: mol_type = other RNA
gtctaccagccagatgcacac

SEQ ID NO: 3299 - RNA, 21 nt, synthetic construct
  source 1..21: mol_type = other RNA
gtcttttttcgcatgtacatt

SEQ ID NO: 3300 - RNA, 21 nt, synthetic construct
  source 1..21: mol_type = other RNA
gtgagtcttttttcgcatgta

SEQ ID NO: 3301 - RNA, 21 nt, synthetic construct
  source 1..21: mol_type = other RNA
gtgcatctggctggtagacta

SEQ ID NO: 3302 - RNA, 21 nt, synthetic construct
  source 1..21: mol_type = other RNA
gtgtgcatctggctggtagac

SEQ ID NO: 3303 - RNA, 21 nt, synthetic construct
  source 1..21: mol_type = other RNA
gttttactagtctaccagcca

SEQ ID NO: 3304 - RNA, 21 nt, synthetic construct
  source 1..21: mol_type = other RNA
tacatcttttctctttctgtt

SEQ ID NO: 3305 - RNA, 21 nt, synthetic construct
  source 1..21: mol_type = other RNA
tacatgcgaaaaaagactcac

SEQ ID NO: 3306 - RNA, 21 nt, synthetic construct
  source 1..21: mol_type = other RNA
taccagccagatgcacacagc

SEQ ID NO: 3307 - RNA, 21 nt, synthetic construct
  source 1..21: mol_type = other RNA
tactagtctaccagccagatg

SEQ ID NO: 3308 - RNA, 21 nt, synthetic construct
  source 1..21: mol_type = other RNA
tagactagtaaaacagaaaga

SEQ ID NO: 3309 - RNA, 21 nt, synthetic construct
  source 1..21: mol_type = other RNA
taggtgagtcttttttcgcat

SEQ ID NO: 3310 - RNA, 21 nt, synthetic construct
  source 1..21: mol_type = other RNA
tagtctaccagccagatgcac

SEQ ID NO: 3311 - RNA, 21 nt, synthetic construct
  source 1..21: mol_type = other RNA
tatacatcttttctctttctg

SEQ ID NO: 3312 - RNA, 21 nt, synthetic construct
  source 1..21: mol_type = other RNA
tatttgcttctccaaagatga

SEQ ID NO: 3313 - RNA, 21 nt, synthetic construct
  source 1..21: mol_type = other RNA
tcaatgtacatgcgaaaaaag

SEQ ID NO: 3314 - RNA, 21 nt, synthetic construct
  source 1..21: mol_type = other RNA
tcacctatttgcttctccaaa

SEQ ID NO: 3315 - RNA, 21 nt, synthetic construct
  source 1..21: mol_type = other RNA
tcatctttggagaagcaaata

SEQ ID NO: 3316 - RNA, 21 nt, synthetic construct
  source 1..21: mol_type = other RNA
tcatctttgggaactcaatgt

SEQ ID NO: 3317 - RNA, 21 nt, synthetic construct
  source 1..21: mol_type = other RNA
tccaaagatgatgctgtgtgc

SEQ ID NO: 3318 - RNA, 21 nt, synthetic construct
  source 1..21: mol_type = other RNA
tcgcatgtacattgagttccc

SEQ ID NO: 3319 - RNA, 21 nt, synthetic construct
  source 1..21: mol_type = other RNA
tctaccagccagatgcacaca

SEQ ID NO: 3320 - RNA, 21 nt, synthetic construct
  source 1..21: mol_type = other RNA
tctccaaagatgatgctgtgt

SEQ ID NO: 3321 - RNA, 21 nt, synthetic construct
  source 1..21: mol_type = other RNA
tctctttctgttttactagtc

SEQ ID NO: 3322 - RNA, 21 nt, synthetic construct
  source 1..21: mol_type = other RNA
tctggctggtagactagtaaa

SEQ ID NO: 3323 - RNA, 21 nt, synthetic construct
  source 1..21: mol_type = other RNA
tctgttttactagtctaccag

SEQ ID NO: 3324 - RNA, 21 nt, synthetic construct
  source 1..21: mol_type = other RNA
tctttctgttttactagtcta

SEQ ID NO: 3325 - RNA, 21 nt, synthetic construct
  source 1..21: mol_type = other RNA
tctttggagaagcaaataggt

SEQ ID NO: 3326 - RNA, 21 nt, synthetic construct
  source 1..21: mol_type = other RNA
tctttgggaactcaatgtaca

SEQ ID NO: 3327 - RNA, 21 nt, synthetic construct
  source 1..21: mol_type = other RNA
tcttttctctttctgttttac

SEQ ID NO: 3328 - RNA, 21 nt, synthetic construct
  source 1..21: mol_type = other RNA
tcttttttcgcatgtacattg

SEQ ID NO: 3329 - RNA, 21 nt, synthetic construct
  source 1..21: mol_type = other RNA
tgagtcttttttcgcatgtac

SEQ ID NO: 3330 - RNA, 21 nt, synthetic construct
  source 1..21: mol_type = other RNA
tgatgctgtgtgcatctggct

SEQ ID NO: 3331 - RNA, 21 nt, synthetic construct
  source 1..21: mol_type = other RNA
tgcacacagcatcatctttgg

SEQ ID NO: 3332 - RNA, 21 nt, synthetic construct
  source 1..21: mol_type = other RNA
tgcatctggctggtagactag

SEQ ID NO: 3333 - RNA, 21 nt, synthetic construct
  source 1..21: mol_type = other RNA
tgcgaaaaaagactcacctat

SEQ ID NO: 3334 - RNA, 21 nt, synthetic construct
  source 1..21: mol_type = other RNA
tgctgtgtgcatctggctggt

SEQ ID NO: 3335 - RNA, 21 nt, synthetic construct
  source 1..21: mol_type = other RNA
tgcttctccaaagatgatgct

SEQ ID NO: 3336 - RNA, 21 nt, synthetic construct
  source 1..21: mol_type = other RNA
tggagaagcaaataggtgagt

SEQ ID NO: 3337 - RNA, 21 nt, synthetic construct
  source 1..21: mol_type = other RNA
tggctggtagactagtaaaac

SEQ ID NO: 3338 - RNA, 21 nt, synthetic construct
  source 1..21: mol_type = other RNA
tgggaactcaatgtacatgcg

SEQ ID NO: 3339 - RNA, 21 nt, synthetic construct
  source 1..21: mol_type = other RNA
tggtagactagtaaaacagaa

SEQ ID NO: 3340 - RNA, 21 nt, synthetic construct
  source 1..21: mol_type = other RNA
tgtacatgcgaaaaaagactc

SEQ ID NO: 3341 - RNA, 21 nt, synthetic construct
  source 1..21: mol_type = other RNA
tgtgcatctggctggtagact

SEQ ID NO: 3342 - RNA, 21 nt, synthetic construct
  source 1..21: mol_type = other RNA
tgtgtgcatctggctggtaga

SEQ ID NO: 3343 - RNA, 21 nt, synthetic construct
  source 1..21: mol_type = other RNA
tgttttactagtctaccagcc

SEQ ID NO: 3344 - RNA, 21 nt, synthetic construct
  source 1..21: mol_type = other RNA
ttactagtctaccagccagat

SEQ ID NO: 3345 - RNA, 21 nt, synthetic construct
  source 1..21: mol_type = other RNA
ttcgcatgtacattgagttcc

SEQ ID NO: 3346 - RNA, 21 nt, synthetic construct
  source 1..21: mol_type = other RNA
ttctccaaagatgatgctgtg

SEQ ID NO: 3347 - RNA, 21 nt, synthetic construct
  source 1..21: mol_type = other RNA
ttctctttctgttttactagt

SEQ ID NO: 3348 - RNA, 21 nt, synthetic construct
  source 1..21: mol_type = other RNA
ttctgttttactagtctacca

SEQ ID NO: 3349 - RNA, 21 nt, synthetic construct
  source 1..21: mol_type = other RNA
ttgcttctccaaagatgatgc

SEQ ID NO: 3350 - RNA, 21 nt, synthetic construct
  source 1..21: mol_type = other RNA
ttggagaagcaaataggtgag

SEQ ID NO: 3351 - RNA, 21 nt, synthetic construct
  source 1..21: mol_type = other RNA
ttgggaactcaatgtacatgc

SEQ ID NO: 3352 - RNA, 21 nt, synthetic construct
  source 1..21: mol_type = other RNA
tttactagtctaccagccaga

SEQ ID NO: 3353 - RNA, 21 nt, synthetic construct
  source 1..21: mol_type = other RNA
tttcgcatgtacattgagttc

SEQ ID NO: 3354 - RNA, 21 nt, synthetic construct
  source 1..21: mol_type = other RNA
tttctctttctgttttactag

SEQ ID NO: 3355 - RNA, 21 nt, synthetic construct
  source 1..21: mol_type = other RNA
tttctgttttactagtctacc

SEQ ID NO: 3356 - RNA, 21 nt, synthetic construct
  source 1..21: mol_type = other RNA
tttgcttctccaaagatgatg

SEQ ID NO: 3357 - RNA, 21 nt, synthetic construct
  source 1..21: mol_type = other RNA
tttggagaagcaaataggtga

SEQ ID NO: 3358 - RNA, 21 nt, synthetic construct
  source 1..21: mol_type = other RNA
tttgggaactcaatgtacatg

SEQ ID NO: 3359 - RNA, 21 nt, synthetic construct
  source 1..21: mol_type = other RNA
ttttactagtctaccagccag

SEQ ID NO: 3360 - RNA, 21 nt, synthetic construct
  source 1..21: mol_type = other RNA
ttttcgcatgtacattgagtt

SEQ ID NO: 3361 - RNA, 21 nt, synthetic construct
  source 1..21: mol_type = other RNA
tttttcgcatgtacattgagt

SEQ ID NO: 3362 - RNA, 21 nt, synthetic construct
  source 1..21: mol_type = other RNA
ttttttcgcatgtacattgag

SEQ ID NO: 3363 - RNA, 22 nt, synthetic construct
  source 1..22: mol_type = other RNA
aaaaaagactcacctatttgct

SEQ ID NO: 3364 - RNA, 22 nt, synthetic construct
  source 1..22: mol_type = other RNA
aaaaagactcacctatttgctt

SEQ ID NO: 3365 - RNA, 22 nt, synthetic construct
  source 1..22: mol_type = other RNA
aaaacagaaagagaaaagatgt

SEQ ID NO: 3366 - RNA, 22 nt, synthetic construct
  source 1..22: mol_type = other RNA
aaaagactcacctatttgcttc

SEQ ID NO: 3367 - RNA, 22 nt, synthetic construct
  source 1..22: mol_type = other RNA
aaacagaaagagaaaagatgta

SEQ ID NO: 3368 - RNA, 22 nt, synthetic construct
  source 1..22: mol_type = other RNA
aaagactcacctatttgcttct

SEQ ID NO: 3369 - RNA, 22 nt, synthetic construct
  source 1..22: mol_type = other RNA
aaagatgatgctgtgtgcatct

SEQ ID NO: 3370 - RNA, 22 nt, synthetic construct
  source 1..22: mol_type = other RNA
aaataggtgagtcttttttcgc

SEQ ID NO: 3371 - RNA, 22 nt, synthetic construct
  source 1..22: mol_type = other RNA
aacagaaagagaaaagatgtat

SEQ ID NO: 3372 - RNA, 22 nt, synthetic construct
  source 1..22: mol_type = other RNA
aactcaatgtacatgcgaaaaa

SEQ ID NO: 3373 - RNA, 22 nt, synthetic construct
  source 1..22: mol_type = other RNA
aagactcacctatttgcttctc

SEQ ID NO: 3374 - RNA, 22 nt, synthetic construct
  source 1..22: mol_type = other RNA
aagatgatgctgtgtgcatctg

SEQ ID NO: 3375 - RNA, 22 nt, synthetic construct
  source 1..22: mol_type = other RNA
aagcaaataggtgagtcttttt

SEQ ID NO: 3376 - RNA, 22 nt, synthetic construct
  source 1..22: mol_type = other RNA
aataggtgagtcttttttcgca

SEQ ID NO: 3377 - RNA, 22 nt, synthetic construct
  source 1..22: mol_type = other RNA
aatgtacatgcgaaaaaagact

SEQ ID NO: 3378 - RNA, 22 nt, synthetic construct
  source 1..22: mol_type = other RNA
acacagcatcatctttggagaa

SEQ ID NO: 3379 - RNA, 22 nt, synthetic construct
  source 1..22: mol_type = other RNA
acagaaagagaaaagatgtata

SEQ ID NO: 3380 - RNA, 22 nt, synthetic construct
  source 1..22: mol_type = other RNA
acagcatcatctttggagaagc

SEQ ID NO: 3381 - RNA, 22 nt, synthetic construct
  source 1..22: mol_type = other RNA
acatcttttctctttctgtttt

SEQ ID NO: 3382 - RNA, 22 nt, synthetic construct
  source 1..22: mol_type = other RNA
acatgcgaaaaaagactcacct

SEQ ID NO: 3383 - RNA, 22 nt, synthetic construct
  source 1..22: mol_type = other RNA
accagccagatgcacacagcat

SEQ ID NO: 3384 - RNA, 22 nt, synthetic construct
  source 1..22: mol_type = other RNA
acctatttgcttctccaaagat

SEQ ID NO: 3385 - RNA, 22 nt, synthetic construct
  source 1..22: mol_type = other RNA
actagtaaaacagaaagagaaa

SEQ ID NO: 3386 - RNA, 22 nt, synthetic construct
  source 1..22: mol_type = other RNA
actagtctaccagccagatgca

SEQ ID NO: 3387 - RNA, 22 nt, synthetic construct
  source 1..22: mol_type = other RNA
actcaatgtacatgcgaaaaaa

SEQ ID NO: 3388 - RNA, 22 nt, synthetic construct
  source 1..22: mol_type = other RNA
actcacctatttgcttctccaa

SEQ ID NO: 3389 - RNA, 22 nt, synthetic construct
  source 1..22: mol_type = other RNA
agaagcaaataggtgagtcttt

SEQ ID NO: 3390 - RNA, 22 nt, synthetic construct
  source 1..22: mol_type = other RNA
agactagtaaaacagaaagaga

SEQ ID NO: 3391 - RNA, 22 nt, synthetic construct
  source 1..22: mol_type = other RNA
agactcacctatttgcttctcc

SEQ ID NO: 3392 - RNA, 22 nt, synthetic construct
  source 1..22: mol_type = other RNA
agatgatgctgtgtgcatctgg

SEQ ID NO: 3393 - RNA, 22 nt, synthetic construct
  source 1..22: mol_type = other RNA
agatgcacacagcatcatcttt

SEQ ID NO: 3394 - RNA, 22 nt, synthetic construct
  source 1..22: mol_type = other RNA
agcaaataggtgagtctttttt

SEQ ID NO: 3395 - RNA, 22 nt, synthetic construct
  source 1..22: mol_type = other RNA
agcatcatctttggagaagcaa

SEQ ID NO: 3396 - RNA, 22 nt, synthetic construct
  source 1..22: mol_type = other RNA
agccagatgcacacagcatcat

SEQ ID NO: 3397 - RNA, 22 nt, synthetic construct
  source 1..22: mol_type = other RNA
aggatcatctttgggaactcaa

SEQ ID NO: 3398 - RNA, 22 nt, synthetic construct
  source 1..22: mol_type = other RNA
aggtgagtcttttttcgcatgt

SEQ ID NO: 3399 - RNA, 22 nt, synthetic construct
  source 1..22: mol_type = other RNA
agtaaaacagaaagagaaaaga

SEQ ID NO: 3400 - RNA, 22 nt, synthetic construct
  source 1..22: mol_type = other RNA
agtctaccagccagatgcacac

SEQ ID NO: 3401 - RNA, 22 nt, synthetic construct
  source 1..22: mol_type = other RNA
agtcttttttcgcatgtacatt

SEQ ID NO: 3402 - RNA, 22 nt, synthetic construct
  source 1..22: mol_type = other RNA
atacatcttttctctttctgtt

SEQ ID NO: 3403 - RNA, 22 nt, synthetic construct
  source 1..22: mol_type = other RNA
ataggtgagtcttttttcgcat

SEQ ID NO: 3404 - RNA, 22 nt, synthetic construct
  source 1..22: mol_type = other RNA
atcatctttggagaagcaaata

SEQ ID NO: 3405 - RNA, 22 nt, synthetic construct
  source 1..22: mol_type = other RNA
atcatctttgggaactcaatgt

SEQ ID NO: 3406 - RNA, 22 nt, synthetic construct
  source 1..22: mol_type = other RNA
atctggctggtagactagtaaa

SEQ ID NO: 3407 - RNA, 22 nt, synthetic construct
  source 1..22: mol_type = other RNA
atctttggagaagcaaataggt

SEQ ID NO: 3408 - RNA, 22 nt, synthetic construct
  source 1..22: mol_type = other RNA
atctttgggaactcaatgtaca

SEQ ID NO: 3409 - RNA, 22 nt, synthetic construct
  source 1..22: mol_type = other RNA
atcttttctctttctgttttac

SEQ ID NO: 3410 - RNA, 22 nt, synthetic construct
  source 1..22: mol_type = other RNA
atgatgctgtgtgcatctggct

SEQ ID NO: 3411 - RNA, 22 nt, synthetic construct
  source 1..22: mol_type = other RNA
atgcacacagcatcatctttgg

SEQ ID NO: 3412 - RNA, 22 nt, synthetic construct
  source 1..22: mol_type = other RNA
atgcgaaaaaagactcacctat

SEQ ID NO: 3413 - RNA, 22 nt, synthetic construct
  source 1..22: mol_type = other RNA
atgctgtgtgcatctggctggt

SEQ ID NO: 3414 - RNA, 22 nt, synthetic construct
  source 1..22: mol_type = other RNA
atgtacatgcgaaaaaagactc

SEQ ID NO: 3415 - RNA, 22 nt, synthetic construct
  source 1..22: mol_type = other RNA
atttgcttctccaaagatgatg

SEQ ID NO: 3416 - RNA, 22 nt, synthetic construct
  source 1..22: mol_type = other RNA
caaagatgatgctgtgtgcatc

SEQ ID NO: 3417 - RNA, 22 nt, synthetic construct
  source 1..22: mol_type = other RNA
caaataggtgagtcttttttcg

SEQ ID NO: 3418 - RNA, 22 nt, synthetic construct
  source 1..22: mol_type = other RNA
caatgtacatgcgaaaaaagac

SEQ ID NO: 3419 - RNA, 22 nt, synthetic construct
  source 1..22: mol_type = other RNA
cacacagcatcatctttggaga

SEQ ID NO: 3420 - RNA, 22 nt, synthetic construct
  source 1..22: mol_type = other RNA
cacagcatcatctttggagaag

SEQ ID NO: 3421 - RNA, 22 nt, synthetic construct
  source 1..22: mol_type = other RNA
cacctatttgcttctccaaaga

SEQ ID NO: 3422 - RNA, 22 nt, synthetic construct
  source 1..22: mol_type = other RNA
cagaaagagaaaagatgtataa

SEQ ID NO: 3423 - RNA, 22 nt, synthetic construct
  source 1..22: mol_type = other RNA
cagatgcacacagcatcatctt

SEQ ID NO: 3424 - RNA, 22 nt, synthetic construct
  source 1..22: mol_type = other RNA
cagcatcatctttggagaagca

SEQ ID NO: 3425 - RNA, 22 nt, synthetic construct
  source 1..22: mol_type = other RNA
cagccagatgcacacagcatca

SEQ ID NO: 3426 - RNA, 22 nt, synthetic construct
  source 1..22: mol_type = other RNA
catcatctttggagaagcaaat

SEQ ID NO: 3427 - RNA, 22 nt, synthetic construct
  source 1..22: mol_type = other RNA
catctggctggtagactagtaa

SEQ ID NO: 3428 - RNA, 22 nt, synthetic construct
  source 1..22: mol_type = other RNA
catctttggagaagcaaatagg

SEQ ID NO: 3429 - RNA, 22 nt, synthetic construct
  source 1..22: mol_type = other RNA
catctttgggaactcaatgtac

SEQ ID NO: 3430 - RNA, 22 nt, synthetic construct
  source 1..22: mol_type = other RNA
catcttttctctttctgtttta

SEQ ID NO: 3431 - RNA, 22 nt, synthetic construct
  source 1..22: mol_type = other RNA
catgcgaaaaaagactcaccta

SEQ ID NO: 3432 - RNA, 22 nt, synthetic construct
  source 1..22: mol_type = other RNA
catgtacattgagttcccaaag

SEQ ID NO: 3433 - RNA, 22 nt, synthetic construct
  source 1..22: mol_type = other RNA
ccaaagatgatgctgtgtgcat

SEQ ID NO: 3434 - RNA, 22 nt, synthetic construct
  source 1..22: mol_type = other RNA
ccagatgcacacagcatcatct

SEQ ID NO: 3435 - RNA, 22 nt, synthetic construct
  source 1..22: mol_type = other RNA
ccagccagatgcacacagcatc

SEQ ID NO: 3436 - RNA, 22 nt, synthetic construct
  source 1..22: mol_type = other RNA
cctatttgcttctccaaagatg

SEQ ID NO: 3437 - RNA, 22 nt, synthetic construct
  source 1..22: mol_type = other RNA
cgaaaaaagactcacctatttg

SEQ ID NO: 3438 - RNA, 22 nt, synthetic construct
  source 1..22: mol_type = other RNA
cgcatgtacattgagttcccaa

SEQ ID NO: 3439 - RNA, 22 nt, synthetic construct
  source 1..22: mol_type = other RNA
ctaccagccagatgcacacagc

SEQ ID NO: 3440 - RNA, 22 nt, synthetic construct
  source 1..22: mol_type = other RNA
ctagtaaaacagaaagagaaaa

SEQ ID NO: 3441 - RNA, 22 nt, synthetic construct
  source 1..22: mol_type = other RNA
ctagtctaccagccagatgcac

SEQ ID NO: 3442 - RNA, 22 nt, synthetic construct
  source 1..22: mol_type = other RNA
ctatttgcttctccaaagatga

SEQ ID NO: 3443 - RNA, 22 nt, synthetic construct
  source 1..22: mol_type = other RNA
ctcaatgtacatgcgaaaaaag

SEQ ID NO: 3444 - RNA, 22 nt, synthetic construct
  source 1..22: mol_type = other RNA
ctcacctatttgcttctccaaa

SEQ ID NO: 3445 - RNA, 22 nt, synthetic construct
  source 1..22: mol_type = other RNA
ctccaaagatgatgctgtgtgc

SEQ ID NO: 3446 - RNA, 22 nt, synthetic construct
  source 1..22: mol_type = other RNA
ctctttctgttttactagtcta

SEQ ID NO: 3447 - RNA, 22 nt, synthetic construct
  source 1..22: mol_type = other RNA
ctggctggtagactagtaaaac

SEQ ID NO: 3448 - RNA, 22 nt, synthetic construct
  source 1..22: mol_type = other RNA
ctggtagactagtaaaacagaa

SEQ ID NO: 3449 - RNA, 22 nt, synthetic construct
  source 1..22: mol_type = other RNA
ctgtgtgcatctggctggtaga

SEQ ID NO: 3450 - RNA, 22 nt, synthetic construct
  source 1..22: mol_type = other RNA
ctgttttactagtctaccagcc

SEQ ID NO: 3451 - RNA, 22 nt, synthetic construct
  source 1..22: mol_type = other RNA
cttctccaaagatgatgctgtg

SEQ ID NO: 3452 - RNA, 22 nt, synthetic construct
  source 1..22: mol_type = other RNA
ctttctgttttactagtctacc

SEQ ID NO: 3453 - RNA, 22 nt, synthetic construct
  source 1..22: mol_type = other RNA
ctttggagaagcaaataggtga

SEQ ID NO: 3454 - RNA, 22 nt, synthetic construct
  source 1..22: mol_type = other RNA
ctttgggaactcaatgtacatg

SEQ ID NO: 3455 - RNA, 22 nt, synthetic construct
  source 1..22: mol_type = other RNA
cttttctctttctgttttacta

SEQ ID NO: 3456 - RNA, 22 nt, synthetic construct
  source 1..22: mol_type = other RNA
cttttttcgcatgtacattgag

SEQ ID NO: 3457 - RNA, 22 nt, synthetic construct
  source 1..22: mol_type = other RNA
gaaaaaagactcacctatttgc

SEQ ID NO: 3458 - RNA, 22 nt, synthetic construct
  source 1..22: mol_type = other RNA
gaactcaatgtacatgcgaaaa

SEQ ID NO: 3459 - RNA, 22 nt, synthetic construct
  source 1..22: mol_type = other RNA
gaagcaaataggtgagtctttt

SEQ ID NO: 3460 - RNA, 22 nt, synthetic construct
  source 1..22: mol_type = other RNA
gactagtaaaacagaaagagaa

SEQ ID NO: 3461 - RNA, 22 nt, synthetic construct
  source 1..22: mol_type = other RNA
gactcacctatttgcttctcca

SEQ ID NO: 3462 - RNA, 22 nt, synthetic construct
  source 1..22: mol_type = other RNA
gagaagcaaataggtgagtctt

SEQ ID NO: 3463 - RNA, 22 nt, synthetic construct
  source 1..22: mol_type = other RNA
gagtcttttttcgcatgtacat

SEQ ID NO: 3464 - RNA, 22 nt, synthetic construct
  source 1..22: mol_type = other RNA
gatcatctttgggaactcaatg

SEQ ID NO: 3465 - RNA, 22 nt, synthetic construct
  source 1..22: mol_type = other RNA
gatgatgctgtgtgcatctggc

SEQ ID NO: 3466 - RNA, 22 nt, synthetic construct
  source 1..22: mol_type = other RNA
gatgcacacagcatcatctttg

SEQ ID NO: 3467 - RNA, 22 nt, synthetic construct
  source 1..22: mol_type = other RNA
gatgctgtgtgcatctggctgg

SEQ ID NO: 3468 - RNA, 22 nt, synthetic construct
  source 1..22: mol_type = other RNA
gcaaataggtgagtcttttttc

SEQ ID NO: 3469 - RNA, 22 nt, synthetic construct
  source 1..22: mol_type = other RNA
gcacacagcatcatctttggag

SEQ ID NO: 3470 - RNA, 22 nt, synthetic construct
  source 1..22: mol_type = other RNA
gcatcatctttggagaagcaaa

SEQ ID NO: 3471 - RNA, 22 nt, synthetic construct
  source 1..22: mol_type = other RNA
gcatctggctggtagactagta

SEQ ID NO: 3472 - RNA, 22 nt, synthetic construct
  source 1..22: mol_type = other RNA
gcatgtacattgagttcccaaa

SEQ ID NO: 3473 - RNA, 22 nt, synthetic construct
  source 1..22: mol_type = other RNA
gccagatgcacacagcatcatc

SEQ ID NO: 3474 - RNA, 22 nt, synthetic construct
  source 1..22: mol_type = other RNA
gcgaaaaaagactcacctattt

SEQ ID NO: 3475 - RNA, 22 nt, synthetic construct
  source 1..22: mol_type = other RNA
gctggtagactagtaaaacaga

SEQ ID NO: 3476 - RNA, 22 nt, synthetic construct
  source 1..22: mol_type = other RNA
gctgtgtgcatctggctggtag

SEQ ID NO: 3477 - RNA, 22 nt, synthetic construct
  source 1..22: mol_type = other RNA
gcttctccaaagatgatgctgt

SEQ ID NO: 3478 - RNA, 22 nt, synthetic construct
  source 1..22: mol_type = other RNA
ggaactcaatgtacatgcgaaa

SEQ ID NO: 3479 - RNA, 22 nt, synthetic construct
  source 1..22: mol_type = other RNA
ggagaagcaaataggtgagtct

SEQ ID NO: 3480 - RNA, 22 nt, synthetic construct
  source 1..22: mol_type = other RNA
ggatcatctttgggaactcaat

SEQ ID NO: 3481 - RNA, 22 nt, synthetic construct
  source 1..22: mol_type = other RNA
ggctggtagactagtaaaacag

SEQ ID NO: 3482 - RNA, 22 nt, synthetic construct
  source 1..22: mol_type = other RNA
gggaactcaatgtacatgcgaa

SEQ ID NO: 3483 - RNA, 22 nt, synthetic construct
  source 1..22: mol_type = other RNA
ggtagactagtaaaacagaaag

SEQ ID NO: 3484 - RNA, 22 nt, synthetic construct
  source 1..22: mol_type = other RNA
ggtgagtcttttttcgcatgta

SEQ ID NO: 3485 - RNA, 22 nt, synthetic construct
  source 1..22: mol_type = other RNA
gtaaaacagaaagagaaaagat

SEQ ID NO: 3486 - RNA, 22 nt, synthetic construct
  source 1..22: mol_type = other RNA
gtacatgcgaaaaaagactcac

SEQ ID NO: 3487 - RNA, 22 nt, synthetic construct
  source 1..22: mol_type = other RNA
gtagactagtaaaacagaaaga

SEQ ID NO: 3488 - RNA, 22 nt, synthetic construct
  source 1..22: mol_type = other RNA
gtctaccagccagatgcacaca

SEQ ID NO: 3489 - RNA, 22 nt, synthetic construct
  source 1..22: mol_type = other RNA
gtcttttttcgcatgtacattg

SEQ ID NO: 3490 - RNA, 22 nt, synthetic construct
  source 1..22: mol_type = other RNA
gtgagtcttttttcgcatgtac

SEQ ID NO: 3491 - RNA, 22 nt, synthetic construct
  source 1..22: mol_type = other RNA
gtgcatctggctggtagactag

SEQ ID NO: 3492 - RNA, 22 nt, synthetic construct
  source 1..22: mol_type = other RNA
gtgtgcatctggctggtagact

SEQ ID NO: 3493 - RNA, 22 nt, synthetic construct
  source 1..22: mol_type = other RNA
gttttactagtctaccagccag

SEQ ID NO: 3494 - RNA, 22 nt, synthetic construct
  source 1..22: mol_type = other RNA
taaaacagaaagagaaaagatg

SEQ ID NO: 3495 - RNA, 22 nt, synthetic construct
  source 1..22: mol_type = other RNA
tacatcttttctctttctgttt

SEQ ID NO: 3496 - RNA, 22 nt, synthetic construct
  source 1..22: mol_type = other RNA
tacatgcgaaaaaagactcacc

SEQ ID NO: 3497 - RNA, 22 nt, synthetic construct
  source 1..22: mol_type = other RNA
taccagccagatgcacacagca

SEQ ID NO: 3498 - RNA, 22 nt, synthetic construct
  source 1..22: mol_type = other RNA
tactagtctaccagccagatgc

SEQ ID NO: 3499 - RNA, 22 nt, synthetic construct
  source 1..22: mol_type = other RNA
tagactagtaaaacagaaagag

SEQ ID NO: 3500 - RNA, 22 nt, synthetic construct
  source 1..22: mol_type = other RNA
taggtgagtcttttttcgcatg

SEQ ID NO: 3501 - RNA, 22 nt, synthetic construct
  source 1..22: mol_type = other RNA
tagtaaaacagaaagagaaaag

SEQ ID NO: 3502 - RNA, 22 nt, synthetic construct
  source 1..22: mol_type = other RNA
tagtctaccagccagatgcaca

SEQ ID NO: 3503 - RNA, 22 nt, synthetic construct
  source 1..22: mol_type = other RNA
tatacatcttttctctttctgt

SEQ ID NO: 3504 - RNA, 22 nt, synthetic construct
  source 1..22: mol_type = other RNA
tatttgcttctccaaagatgat

SEQ ID NO: 3505 - RNA, 22 nt, synthetic construct
  source 1..22: mol_type = other RNA
tcaatgtacatgcgaaaaaaga

SEQ ID NO: 3506 - RNA, 22 nt, synthetic construct
  source 1..22: mol_type = other RNA
tcacctatttgcttctccaaag

SEQ ID NO: 3507 - RNA, 22 nt, synthetic construct
  source 1..22: mol_type = other RNA
tcatctttggagaagcaaatag

SEQ ID NO: 3508 - RNA, 22 nt, synthetic construct
  source 1..22: mol_type = other RNA
tcatctttgggaactcaatgta

SEQ ID NO: 3509 - RNA, 22 nt, synthetic construct
  source 1..22: mol_type = other RNA
tccaaagatgatgctgtgtgca

SEQ ID NO: 3510 - RNA, 22 nt, synthetic construct
  source 1..22: mol_type = other RNA
tcgcatgtacattgagttccca

SEQ ID NO: 3511 - RNA, 22 nt, synthetic construct
  source 1..22: mol_type = other RNA
tctaccagccagatgcacacag

SEQ ID NO: 3512 - RNA, 22 nt, synthetic construct
  source 1..22: mol_type = other RNA
tctccaaagatgatgctgtgtg

SEQ ID NO: 3513 - RNA, 22 nt, synthetic construct
  source 1..22: mol_type = other RNA
tctctttctgttttactagtct

SEQ ID NO: 3514 - RNA, 22 nt, synthetic construct
  source 1..22: mol_type = other RNA
tctggctggtagactagtaaaa

SEQ ID NO: 3515 - RNA, 22 nt, synthetic construct
  source 1..22: mol_type = other RNA
tctgttttactagtctaccagc

SEQ ID NO: 3516 - RNA, 22 nt, synthetic construct
  source 1..22: mol_type = other RNA
tctttctgttttactagtctac

SEQ ID NO: 3517 - RNA, 22 nt, synthetic construct
  source 1..22: mol_type = other RNA
tctttggagaagcaaataggtg

SEQ ID NO: 3518 - RNA, 22 nt, synthetic construct
  source 1..22: mol_type = other RNA
tctttgggaactcaatgtacat

SEQ ID NO: 3519 - RNA, 22 nt, synthetic construct
  source 1..22: mol_type = other RNA
tcttttctctttctgttttact

SEQ ID NO: 3520 - RNA, 22 nt, synthetic construct
  source 1..22: mol_type = other RNA
tcttttttcgcatgtacattga

SEQ ID NO: 3521 - RNA, 22 nt, synthetic construct
  source 1..22: mol_type = other RNA
tgagtcttttttcgcatgtaca

SEQ ID NO: 3522 - RNA, 22 nt, synthetic construct
  source 1..22: mol_type = other RNA
tgatgctgtgtgcatctggctg

SEQ ID NO: 3523 - RNA, 22 nt, synthetic construct
  source 1..22: mol_type = other RNA
tgcacacagcatcatctttgga

SEQ ID NO: 3524 - RNA, 22 nt, synthetic construct
  source 1..22: mol_type = other RNA
tgcatctggctggtagactagt

SEQ ID NO: 3525 - RNA, 22 nt, synthetic construct
  source 1..22: mol_type = other RNA
tgcgaaaaaagactcacctatt

SEQ ID NO: 3526 - RNA, 22 nt, synthetic construct
  source 1..22: mol_type = other RNA
tgctgtgtgcatctggctggta

SEQ ID NO: 3527 - RNA, 22 nt, synthetic construct
  source 1..22: mol_type = other RNA
tgcttctccaaagatgatgctg

SEQ ID NO: 3528 - RNA, 22 nt, synthetic construct
  source 1..22: mol_type = other RNA
tggagaagcaaataggtgagtc

SEQ ID NO: 3529 - RNA, 22 nt, synthetic construct
  source 1..22: mol_type = other RNA
tggctggtagactagtaaaaca

SEQ ID NO: 3530 - RNA, 22 nt, synthetic construct
  source 1..22: mol_type = other RNA
tgggaactcaatgtacatgcga

SEQ ID NO: 3531 - RNA, 22 nt, synthetic construct
  source 1..22: mol_type = other RNA
tggtagactagtaaaacagaaa

SEQ ID NO: 3532 - RNA, 22 nt, synthetic construct
  source 1..22: mol_type = other RNA
tgtacatgcgaaaaaagactca

SEQ ID NO: 3533 - RNA, 22 nt, synthetic construct
  source 1..22: mol_type = other RNA
tgtgcatctggctggtagacta

SEQ ID NO: 3534 - RNA, 22 nt, synthetic construct
  source 1..22: mol_type = other RNA
tgtgtgcatctggctggtagac

SEQ ID NO: 3535 - RNA, 22 nt, synthetic construct
  source 1..22: mol_type = other RNA
tgttttactagtctaccagcca

SEQ ID NO: 3536 - RNA, 22 nt, synthetic construct
  source 1..22: mol_type = other RNA
ttactagtctaccagccagatg

SEQ ID NO: 3537 - RNA, 22 nt, synthetic construct
  source 1..22: mol_type = other RNA
ttatacatcttttctctttctg

SEQ ID NO: 3538 - RNA, 22 nt, synthetic construct
  source 1..22: mol_type = other RNA
ttcgcatgtacattgagttccc

SEQ ID NO: 3539 - RNA, 22 nt, synthetic construct
  source 1..22: mol_type = other RNA
ttctccaaagatgatgctgtgt

SEQ ID NO: 3540 - RNA, 22 nt, synthetic construct
  source 1..22: mol_type = other RNA
ttctctttctgttttactagtc

SEQ ID NO: 3541 - RNA, 22 nt, synthetic construct
  source 1..22: mol_type = other RNA
ttctgttttactagtctaccag

SEQ ID NO: 3542 - RNA, 22 nt, synthetic construct
  source 1..22: mol_type = other RNA
ttgcttctccaaagatgatgct

SEQ ID NO: 3543 - RNA, 22 nt, synthetic construct
  source 1..22: mol_type = other RNA
ttggagaagcaaataggtgagt

SEQ ID NO: 3544 - RNA, 22 nt, synthetic construct
  source 1..22: mol_type = other RNA
ttgggaactcaatgtacatgcg

SEQ ID NO: 3545 - RNA, 22 nt, synthetic construct
  source 1..22: mol_type = other RNA
tttactagtctaccagccagat

SEQ ID NO: 3546 - RNA, 22 nt, synthetic construct
  source 1..22: mol_type = other RNA
tttcgcatgtacattgagttcc

SEQ ID NO: 3547 - RNA, 22 nt, synthetic construct
  source 1..22: mol_type = other RNA
tttctctttctgttttactagt

SEQ ID NO: 3548 - RNA, 22 nt, synthetic construct
  source 1..22: mol_type = other RNA
tttctgttttactagtctacca

SEQ ID NO: 3549 - RNA, 22 nt, synthetic construct
  source 1..22: mol_type = other RNA
tttgcttctccaaagatgatgc

SEQ ID NO: 3550 - RNA, 22 nt, synthetic construct
  source 1..22: mol_type = other RNA
tttggagaagcaaataggtgag

SEQ ID NO: 3551 - RNA, 22 nt, synthetic construct
  source 1..22: mol_type = other RNA
tttgggaactcaatgtacatgc

SEQ ID NO: 3552 - RNA, 22 nt, synthetic construct
  source 1..22: mol_type = other RNA
ttttactagtctaccagccaga

SEQ ID NO: 3553 - RNA, 22 nt, synthetic construct
  source 1..22: mol_type = other RNA
ttttcgcatgtacattgagttc

SEQ ID NO: 3554 - RNA, 22 nt, synthetic construct
  source 1..22: mol_type = other RNA
ttttctctttctgttttactag

SEQ ID NO: 3555 - RNA, 22 nt, synthetic construct
  source 1..22: mol_type = other RNA
tttttcgcatgtacattgagtt

SEQ ID NO: 3556 - RNA, 22 nt, synthetic construct
  source 1..22: mol_type = other RNA
ttttttcgcatgtacattgagt

SEQ ID NO: 3557 - RNA, 20 nt, synthetic construct
  source 1..20: mol_type = other RNA
aaaaaaggagctgaggaaag

SEQ ID NO: 3558 - RNA, 20 nt, synthetic construct
  source 1..20: mol_type = other RNA
aaaaaggagctgaggaaagt

SEQ ID NO: 3559 - RNA, 20 nt, synthetic construct
  source 1..20: mol_type = other RNA
aaaagctttcccaaatctca

SEQ ID NO: 3560 - RNA, 20 nt, synthetic construct
  source 1..20: mol_type = other RNA
aaaaggagctgaggaaagtg

SEQ ID NO: 3561 - RNA, 20 nt, synthetic construct
  source 1..20: mol_type = other RNA
aaagctttcccaaatctcac

SEQ ID NO: 3562 - RNA, 20 nt, synthetic construct
  source 1..20: mol_type = other RNA
aaaggagctgaggaaagtgg

SEQ ID NO: 3563 - RNA, 20 nt, synthetic construct
  source 1..20: mol_type = other RNA
aaagtggcccatttaacagg

SEQ ID NO: 3564 - RNA, 20 nt, synthetic construct
  source 1..20: mol_type = other RNA
aaatctcacctgtaccttcc

SEQ ID NO: 3565 - RNA, 20 nt, synthetic construct
  source 1..20: mol_type = other RNA
aaatgggccactttcctcag

SEQ ID NO: 3566 - RNA, 20 nt, synthetic construct
  source 1..20: mol_type = other RNA
aacaggtctgtatctggaag

SEQ ID NO: 3567 - RNA, 20 nt, synthetic construct
  source 1..20: mol_type = other RNA
aacatatatttttcctctct

SEQ ID NO: 3568 - RNA, 20 nt, synthetic construct
  source 1..20: mol_type = other RNA
aagctttcccaaatctcacc

SEQ ID NO: 3569 - RNA, 20 nt, synthetic construct
  source 1..20: mol_type = other RNA
aaggagctgaggaaagtggc

SEQ ID NO: 3570 - RNA, 20 nt, synthetic construct
  source 1..20: mol_type = other RNA
aaggtacaggtgagatttgg

SEQ ID NO: 3571 - RNA, 20 nt, synthetic construct
  source 1..20: mol_type = other RNA
aagtggcccatttaacaggt

SEQ ID NO: 3572 - RNA, 20 nt, synthetic construct
  source 1..20: mol_type = other RNA
aatctcacctgtaccttcca

SEQ ID NO: 3573 - RNA, 20 nt, synthetic construct
  source 1..20: mol_type = other RNA
aatgggccactttcctcagc

SEQ ID NO: 3574 - RNA, 20 nt, synthetic construct
  source 1..20: mol_type = other RNA
acagacctgttaaatgggcc

SEQ ID NO: 3575 - RNA, 20 nt, synthetic construct
  source 1..20: mol_type = other RNA
acaggccaccccagtccacc

SEQ ID NO: 3576 - RNA, 20 nt, synthetic construct
  source 1..20: mol_type = other RNA
acaggtctgtatctggaagg

SEQ ID NO: 3577 - RNA, 20 nt, synthetic construct
  source 1..20: mol_type = other RNA
acaggtgagatttgggaaag

SEQ ID NO: 3578 - RNA, 20 nt, synthetic construct
  source 1..20: mol_type = other RNA
acatatatttttcctctctc

SEQ ID NO: 3579 - RNA, 20 nt, synthetic construct
  source 1..20: mol_type = other RNA
accccagtccaccccctgaa

SEQ ID NO: 3580 - RNA, 20 nt, synthetic construct
  source 1..20: mol_type = other RNA
acctgtaccttccagataca

SEQ ID NO: 3581 - RNA, 20 nt, synthetic construct
  source 1..20: mol_type = other RNA
acctgttaaatgggccactt

SEQ ID NO: 3582 - RNA, 20 nt, synthetic construct
  source 1..20: mol_type = other RNA
accttccagatacagacctg

SEQ ID NO: 3583 - RNA, 20 nt, synthetic construct
  source 1..20: mol_type = other RNA
actggggtggcctgtatcat

SEQ ID NO: 3584 - RNA, 20 nt, synthetic construct
  source 1..20: mol_type = other RNA
actttcctcagctccttttt

SEQ ID NO: 3585 - RNA, 20 nt, synthetic construct
  source 1..20: mol_type = other RNA
agacctgttaaatgggccac

SEQ ID NO: 3586 - RNA, 20 nt, synthetic construct
  source 1..20: mol_type = other RNA
agagagaggaaaaatatatg

SEQ ID NO: 3587 - RNA, 20 nt, synthetic construct
  source 1..20: mol_type = other RNA
agagaggaaaaatatatgtt

SEQ ID NO: 3588 - RNA, 20 nt, synthetic construct
  source 1..20: mol_type = other RNA
agatacagacctgttaaatg

SEQ ID NO: 3589 - RNA, 20 nt, synthetic construct
  source 1..20: mol_type = other RNA
agctgaggaaagtggcccat

SEQ ID NO: 3590 - RNA, 20 nt, synthetic construct
  source 1..20: mol_type = other RNA
agctttcccaaatctcacct

SEQ ID NO: 3591 - RNA, 20 nt, synthetic construct
  source 1..20: mol_type = other RNA
aggaaagtggcccatttaac

SEQ ID NO: 3592 - RNA, 20 nt, synthetic construct
  source 1..20: mol_type = other RNA
aggagctgaggaaagtggcc

SEQ ID NO: 3593 - RNA, 20 nt, synthetic construct
  source 1..20: mol_type = other RNA
aggccaccccagtccacccc

SEQ ID NO: 3594 - RNA, 20 nt, synthetic construct
  source 1..20: mol_type = other RNA
agggggtggactggggtggc

SEQ ID NO: 3595 - RNA, 20 nt, synthetic construct
  source 1..20: mol_type = other RNA
aggtacaggtgagatttggg

SEQ ID NO: 3596 - RNA, 20 nt, synthetic construct
  source 1..20: mol_type = other RNA
aggtctgtatctggaaggta

SEQ ID NO: 3597 - RNA, 20 nt, synthetic construct
  source 1..20: mol_type = other RNA
agtggcccatttaacaggtc

SEQ ID NO: 3598 - RNA, 20 nt, synthetic construct
  source 1..20: mol_type = other RNA
atacagacctgttaaatggg

SEQ ID NO: 3599 - RNA, 20 nt, synthetic construct
  source 1..20: mol_type = other RNA
atacaggccaccccagtcca

SEQ ID NO: 3600 - RNA, 20 nt, synthetic construct
  source 1..20: mol_type = other RNA
atagagagaggaaaaatata

SEQ ID NO: 3601 - RNA, 20 nt, synthetic construct
  source 1..20: mol_type = other RNA
atatatttttcctctctcta

SEQ ID NO: 3602 - RNA, 20 nt, synthetic construct
  source 1..20: mol_type = other RNA
atatttttcctctctctatg

SEQ ID NO: 3603 - RNA, 20 nt, synthetic construct
  source 1..20: mol_type = other RNA
atcatagagagaggaaaaat

SEQ ID NO: 3604 - RNA, 20 nt, synthetic construct
  source 1..20: mol_type = other RNA
atctcacctgtaccttccag

SEQ ID NO: 3605 - RNA, 20 nt, synthetic construct
  source 1..20: mol_type = other RNA
atctggaaggtacaggtgag

SEQ ID NO: 3606 - RNA, 20 nt, synthetic construct
  source 1..20: mol_type = other RNA
atgatacaggccaccccagt

SEQ ID NO: 3607 - RNA, 20 nt, synthetic construct
  source 1..20: mol_type = other RNA
atgggccactttcctcagct

SEQ ID NO: 3608 - RNA, 20 nt, synthetic construct
  source 1..20: mol_type = other RNA
atttaacaggtctgtatctg

SEQ ID NO: 3609 - RNA, 20 nt, synthetic construct
  source 1..20: mol_type = other RNA
atttttcctctctctatgat

SEQ ID NO: 3610 - RNA, 20 nt, synthetic construct
  source 1..20: mol_type = other RNA
caaaagctttcccaaatctc

SEQ ID NO: 3611 - RNA, 20 nt, synthetic construct
  source 1..20: mol_type = other RNA
caaatctcacctgtaccttc

SEQ ID NO: 3612 - RNA, 20 nt, synthetic construct
  source 1..20: mol_type = other RNA
caccccagtccaccccctga

SEQ ID NO: 3613 - RNA, 20 nt, synthetic construct
  source 1..20: mol_type = other RNA
cacctgtaccttccagatac

SEQ ID NO: 3614 - RNA, 20 nt, synthetic construct
  source 1..20: mol_type = other RNA
cactttcctcagctcctttt

SEQ ID NO: 3615 - RNA, 20 nt, synthetic construct
  source 1..20: mol_type = other RNA
cagacctgttaaatgggcca

SEQ ID NO: 3616 - RNA, 20 nt, synthetic construct
  source 1..20: mol_type = other RNA
cagatacagacctgttaaat

SEQ ID NO: 3617 - RNA, 20 nt, synthetic construct
  source 1..20: mol_type = other RNA
caggccaccccagtccaccc

SEQ ID NO: 3618 - RNA, 20 nt, synthetic construct
  source 1..20: mol_type = other RNA
cagggggtggactggggtgg

SEQ ID NO: 3619 - RNA, 20 nt, synthetic construct
  source 1..20: mol_type = other RNA
caggtctgtatctggaaggt

SEQ ID NO: 3620 - RNA, 20 nt, synthetic construct
  source 1..20: mol_type = other RNA
cagtccaccccctgaaaaaa

SEQ ID NO: 3621 - RNA, 20 nt, synthetic construct
  source 1..20: mol_type = other RNA
catagagagaggaaaaatat

SEQ ID NO: 3622 - RNA, 20 nt, synthetic construct
  source 1..20: mol_type = other RNA
catatatttttcctctctct

SEQ ID NO: 3623 - RNA, 20 nt, synthetic construct
  source 1..20: mol_type = other RNA
catttaacaggtctgtatct

SEQ ID NO: 3624 - RNA, 20 nt, synthetic construct
  source 1..20: mol_type = other RNA
ccaaaagctttcccaaatct

SEQ ID NO: 3625 - RNA, 20 nt, synthetic construct
  source 1..20: mol_type = other RNA
ccaaatctcacctgtacctt

SEQ ID NO: 3626 - RNA, 20 nt, synthetic construct
  source 1..20: mol_type = other RNA
ccaccccagtccaccccctg

SEQ ID NO: 3627 - RNA, 20 nt, synthetic construct
  source 1..20: mol_type = other RNA
ccactttcctcagctccttt

SEQ ID NO: 3628 - RNA, 20 nt, synthetic construct
  source 1..20: mol_type = other RNA
ccagatacagacctgttaaa

SEQ ID NO: 3629 - RNA, 20 nt, synthetic construct
  source 1..20: mol_type = other RNA
ccagtccaccccctgaaaaa

SEQ ID NO: 3630 - RNA, 20 nt, synthetic construct
  source 1..20: mol_type = other RNA
ccatttaacaggtctgtatc

SEQ ID NO: 3631 - RNA, 20 nt, synthetic construct
  source 1..20: mol_type = other RNA
cccaaatctcacctgtacct

SEQ ID NO: 3632 - RNA, 20 nt, synthetic construct
  source 1..20: mol_type = other RNA
cccagtccaccccctgaaaa

SEQ ID NO: 3633 - RNA, 20 nt, synthetic construct
  source 1..20: mol_type = other RNA
cccatttaacaggtctgtat

SEQ ID NO: 3634 - RNA, 20 nt, synthetic construct
  source 1..20: mol_type = other RNA
ccccagtccaccccctgaaa

SEQ ID NO: 3635 - RNA, 20 nt, synthetic construct
  source 1..20: mol_type = other RNA
cctctctctatgatacaggc

SEQ ID NO: 3636 - RNA, 20 nt, synthetic construct
  source 1..20: mol_type = other RNA
cctgtaccttccagatacag

SEQ ID NO: 3637 - RNA, 20 nt, synthetic construct
  source 1..20: mol_type = other RNA
cctgtatcatagagagagga

SEQ ID NO: 3638 - RNA, 20 nt, synthetic construct
  source 1..20: mol_type = other RNA
cctgttaaatgggccacttt

SEQ ID NO: 3639 - RNA, 20 nt, synthetic construct
  source 1..20: mol_type = other RNA
ccttccagatacagacctgt

SEQ ID NO: 3640 - RNA, 20 nt, synthetic construct
  source 1..20: mol_type = other RNA
ctatgatacaggccacccca

SEQ ID NO: 3641 - RNA, 20 nt, synthetic construct
  source 1..20: mol_type = other RNA
ctcacctgtaccttccagat

SEQ ID NO: 3642 - RNA, 20 nt, synthetic construct
  source 1..20: mol_type = other RNA
ctctatgatacaggccaccc

SEQ ID NO: 3643 - RNA, 20 nt, synthetic construct
  source 1..20: mol_type = other RNA
ctctctatgatacaggccac

SEQ ID NO: 3644 - RNA, 20 nt, synthetic construct
  source 1..20: mol_type = other RNA
ctctctctatgatacaggcc

SEQ ID NO: 3645 - RNA, 20 nt, synthetic construct
  source 1..20: mol_type = other RNA
ctgaggaaagtggcccattt

SEQ ID NO: 3646 - RNA, 20 nt, synthetic construct
  source 1..20: mol_type = other RNA
ctggaaggtacaggtgagat

SEQ ID NO: 3647 - RNA, 20 nt, synthetic construct
  source 1..20: mol_type = other RNA
ctggggtggcctgtatcata

SEQ ID NO: 3648 - RNA, 20 nt, synthetic construct
  source 1..20: mol_type = other RNA
ctgtaccttccagatacaga

SEQ ID NO: 3649 - RNA, 20 nt, synthetic construct
  source 1..20: mol_type = other RNA
ctgtatcatagagagaggaa

SEQ ID NO: 3650 - RNA, 20 nt, synthetic construct
  source 1..20: mol_type = other RNA
ctgtatctggaaggtacagg

SEQ ID NO: 3651 - RNA, 20 nt, synthetic construct
  source 1..20: mol_type = other RNA
ctgttaaatgggccactttc

SEQ ID NO: 3652 - RNA, 20 nt, synthetic construct
  source 1..20: mol_type = other RNA
cttccagatacagacctgtt

SEQ ID NO: 3653 - RNA, 20 nt, synthetic construct
  source 1..20: mol_type = other RNA
ctttcccaaatctcacctgt

SEQ ID NO: 3654 - RNA, 20 nt, synthetic construct
  source 1..20: mol_type = other RNA
ctttcctcagctcctttttt

SEQ ID NO: 3655 - RNA, 20 nt, synthetic construct
  source 1..20: mol_type = other RNA
gaaagtggcccatttaacag

SEQ ID NO: 3656 - RNA, 20 nt, synthetic construct
  source 1..20: mol_type = other RNA
gaaggtacaggtgagatttg

SEQ ID NO: 3657 - RNA, 20 nt, synthetic construct
  source 1..20: mol_type = other RNA
gacctgttaaatgggccact

SEQ ID NO: 3658 - RNA, 20 nt, synthetic construct
  source 1..20: mol_type = other RNA
gactggggtggcctgtatca

SEQ ID NO: 3659 - RNA, 20 nt, synthetic construct
  source 1..20: mol_type = other RNA
gagagaggaaaaatatatgt

SEQ ID NO: 3660 - RNA, 20 nt, synthetic construct
  source 1..20: mol_type = other RNA
gagaggaaaaatatatgtta

SEQ ID NO: 3661 - RNA, 20 nt, synthetic construct
  source 1..20: mol_type = other RNA
gagctgaggaaagtggccca

SEQ ID NO: 3662 - RNA, 20 nt, synthetic construct
  source 1..20: mol_type = other RNA
gaggaaagtggcccatttaa

SEQ ID NO: 3663 - RNA, 20 nt, synthetic construct
  source 1..20: mol_type = other RNA
gatacagacctgttaaatgg

SEQ ID NO: 3664 - RNA, 20 nt, synthetic construct
  source 1..20: mol_type = other RNA
gatacaggccaccccagtcc

SEQ ID NO: 3665 - RNA, 20 nt, synthetic construct
  source 1..20: mol_type = other RNA
gccaaaagctttcccaaatc

SEQ ID NO: 3666 - RNA, 20 nt, synthetic construct
  source 1..20: mol_type = other RNA
gccaccccagtccaccccct

SEQ ID NO: 3667 - RNA, 20 nt, synthetic construct
  source 1..20: mol_type = other RNA
gccactttcctcagctcctt

SEQ ID NO: 3668 - RNA, 20 nt, synthetic construct
  source 1..20: mol_type = other RNA
gcccatttaacaggtctgta

SEQ ID NO: 3669 - RNA, 20 nt, synthetic construct
  source 1..20: mol_type = other RNA
gcctgtatcatagagagagg

SEQ ID NO: 3670 - RNA, 20 nt, synthetic construct
  source 1..20: mol_type = other RNA
gctgaggaaagtggcccatt

SEQ ID NO: 3671 - RNA, 20 nt, synthetic construct
  source 1..20: mol_type = other RNA
gctttcccaaatctcacctg

SEQ ID NO: 3672 - RNA, 20 nt, synthetic construct
  source 1..20: mol_type = other RNA
ggaaagtggcccatttaaca

SEQ ID NO: 3673 - RNA, 20 nt, synthetic construct
  source 1..20: mol_type = other RNA
ggaaggtacaggtgagattt

SEQ ID NO: 3674 - RNA, 20 nt, synthetic construct
  source 1..20: mol_type = other RNA
ggactggggtggcctgtatc

SEQ ID NO: 3675 - RNA, 20 nt, synthetic construct
  source 1..20: mol_type = other RNA
ggagctgaggaaagtggccc

SEQ ID NO: 3676 - RNA, 20 nt, synthetic construct
  source 1..20: mol_type = other RNA
ggccaccccagtccaccccc

SEQ ID NO: 3677 - RNA, 20 nt, synthetic construct
  source 1..20: mol_type = other RNA
ggccactttcctcagctcct

SEQ ID NO: 3678 - RNA, 20 nt, synthetic construct
  source 1..20: mol_type = other RNA
ggcccatttaacaggtctgt

SEQ ID NO: 3679 - RNA, 20 nt, synthetic construct
  source 1..20: mol_type = other RNA
ggcctgtatcatagagagag

SEQ ID NO: 3680 - RNA, 20 nt, synthetic construct
  source 1..20: mol_type = other RNA
gggccactttcctcagctcc

SEQ ID NO: 3681 - RNA, 20 nt, synthetic construct
  source 1..20: mol_type = other RNA
gggggtggactggggtggcc

SEQ ID NO: 3682 - RNA, 20 nt, synthetic construct
  source 1..20: mol_type = other RNA
ggggtggactggggtggcct

SEQ ID NO: 3683 - RNA, 20 nt, synthetic construct
  source 1..20: mol_type = other RNA
ggggtggcctgtatcataga

SEQ ID NO: 3684 - RNA, 20 nt, synthetic construct
  source 1..20: mol_type = other RNA
gggtggactggggtggcctg

SEQ ID NO: 3685 - RNA, 20 nt, synthetic construct
  source 1..20: mol_type = other RNA
gggtggcctgtatcatagag

SEQ ID NO: 3686 - RNA, 20 nt, synthetic construct
  source 1..20: mol_type = other RNA
ggtacaggtgagatttggga

SEQ ID NO: 3687 - RNA, 20 nt, synthetic construct
  source 1..20: mol_type = other RNA
ggtctgtatctggaaggtac

SEQ ID NO: 3688 - RNA, 20 nt, synthetic construct
  source 1..20: mol_type = other RNA
ggtggactggggtggcctgt

SEQ ID NO: 3689 - RNA, 20 nt, synthetic construct
  source 1..20: mol_type = other RNA
ggtggcctgtatcatagaga

SEQ ID NO: 3690 - RNA, 20 nt, synthetic construct
  source 1..20: mol_type = other RNA
gtacaggtgagatttgggaa

SEQ ID NO: 3691 - RNA, 20 nt, synthetic construct
  source 1..20: mol_type = other RNA
gtaccttccagatacagacc

SEQ ID NO: 3692 - RNA, 20 nt, synthetic construct
  source 1..20: mol_type = other RNA
gtatcatagagagaggaaaa

SEQ ID NO: 3693 - RNA, 20 nt, synthetic construct
  source 1..20: mol_type = other RNA
gtatctggaaggtacaggtg

SEQ ID NO: 3694 - RNA, 20 nt, synthetic construct
  source 1..20: mol_type = other RNA
gtctgtatctggaaggtaca

SEQ ID NO: 3695 - RNA, 20 nt, synthetic construct
  source 1..20: mol_type = other RNA
gtggactggggtggcctgta

SEQ ID NO: 3696 - RNA, 20 nt, synthetic construct
  source 1..20: mol_type = other RNA
gtggcccatttaacaggtct

SEQ ID NO: 3697 - RNA, 20 nt, synthetic construct
  source 1..20: mol_type = other RNA
gtggcctgtatcatagagag

SEQ ID NO: 3698 - RNA, 20 nt, synthetic construct
  source 1..20: mol_type = other RNA
gttaaatgggccactttcct

SEQ ID NO: 3699 - RNA, 20 nt, synthetic construct
  source 1..20: mol_type = other RNA
taaatgggccactttcctca

SEQ ID NO: 3700 - RNA, 20 nt, synthetic construct
  source 1..20: mol_type = other RNA
taacaggtctgtatctggaa

SEQ ID NO: 3701 - RNA, 20 nt, synthetic construct
  source 1..20: mol_type = other RNA
taacatatatttttcctctc

SEQ ID NO: 3702 - RNA, 20 nt, synthetic construct
  source 1..20: mol_type = other RNA
tacagacctgttaaatgggc

SEQ ID NO: 3703 - RNA, 20 nt, synthetic construct
  source 1..20: mol_type = other RNA
tacaggccaccccagtccac

SEQ ID NO: 3704 - RNA, 20 nt, synthetic construct
  source 1..20: mol_type = other RNA
tacaggtgagatttgggaaa

SEQ ID NO: 3705 - RNA, 20 nt, synthetic construct
  source 1..20: mol_type = other RNA
taccttccagatacagacct

SEQ ID NO: 3706 - RNA, 20 nt, synthetic construct
  source 1..20: mol_type = other RNA
tagagagaggaaaaatatat

SEQ ID NO: 3707 - RNA, 20 nt, synthetic construct
  source 1..20: mol_type = other RNA
tatatttttcctctctctat

SEQ ID NO: 3708 - RNA, 20 nt, synthetic construct
  source 1..20: mol_type = other RNA
tatcatagagagaggaaaaa

SEQ ID NO: 3709 - RNA, 20 nt, synthetic construct
  source 1..20: mol_type = other RNA
tatctggaaggtacaggtga

SEQ ID NO: 3710 - RNA, 20 nt, synthetic construct
  source 1..20: mol_type = other RNA
tatgatacaggccaccccag

SEQ ID NO: 3711 - RNA, 20 nt, synthetic construct
  source 1..20: mol_type = other RNA
tatttttcctctctctatga

SEQ ID NO: 3712 - RNA, 20 nt, synthetic construct
  source 1..20: mol_type = other RNA
tcacctgtaccttccagata

SEQ ID NO: 3713 - RNA, 20 nt, synthetic construct
  source 1..20: mol_type = other RNA
tcagggggtggactggggtg

SEQ ID NO: 3714 - RNA, 20 nt, synthetic construct
  source 1..20: mol_type = other RNA
tcatagagagaggaaaaata

SEQ ID NO: 3715 - RNA, 20 nt, synthetic construct
  source 1..20: mol_type = other RNA
tccagatacagacctgttaa

SEQ ID NO: 3716 - RNA, 20 nt, synthetic construct
  source 1..20: mol_type = other RNA
tcccaaatctcacctgtacc

SEQ ID NO: 3717 - RNA, 20 nt, synthetic construct
  source 1..20: mol_type = other RNA
tcctctctctatgatacagg

SEQ ID NO: 3718 - RNA, 20 nt, synthetic construct
  source 1..20: mol_type = other RNA
tctatgatacaggccacccc

SEQ ID NO: 3719 - RNA, 20 nt, synthetic construct
  source 1..20: mol_type = other RNA
tctcacctgtaccttccaga

SEQ ID NO: 3720 - RNA, 20 nt, synthetic construct
  source 1..20: mol_type = other RNA
tctctatgatacaggccacc

SEQ ID NO: 3721 - RNA, 20 nt, synthetic construct
  source 1..20: mol_type = other RNA
tctctctatgatacaggcca

SEQ ID NO: 3722 - RNA, 20 nt, synthetic construct
  source 1..20: mol_type = other RNA
tctggaaggtacaggtgaga

SEQ ID NO: 3723 - RNA, 20 nt, synthetic construct
  source 1..20: mol_type = other RNA
tctgtatctggaaggtacag

SEQ ID NO: 3724 - RNA, 20 nt, synthetic construct
  source 1..20: mol_type = other RNA
tgaggaaagtggcccattta

SEQ ID NO: 3725 - RNA, 20 nt, synthetic construct
  source 1..20: mol_type = other RNA
tgatacaggccaccccagtc

SEQ ID NO: 3726 - RNA, 20 nt, synthetic construct
  source 1..20: mol_type = other RNA
tggaaggtacaggtgagatt

SEQ ID NO: 3727 - RNA, 20 nt, synthetic construct
  source 1..20: mol_type = other RNA
tggactggggtggcctgtat

SEQ ID NO: 3728 - RNA, 20 nt, synthetic construct
  source 1..20: mol_type = other RNA
tggcccatttaacaggtctg

SEQ ID NO: 3729 - RNA, 20 nt, synthetic construct
  source 1..20: mol_type = other RNA
tggcctgtatcatagagaga

SEQ ID NO: 3730 - RNA, 20 nt, synthetic construct
  source 1..20: mol_type = other RNA
tgggccactttcctcagctc

SEQ ID NO: 3731 - RNA, 20 nt, synthetic construct
  source 1..20: mol_type = other RNA
tggggtggcctgtatcatag

SEQ ID NO: 3732 - RNA, 20 nt, synthetic construct
  source 1..20: mol_type = other RNA
tgtaccttccagatacagac

SEQ ID NO: 3733 - RNA, 20 nt, synthetic construct
  source 1..20: mol_type = other RNA
tgtatcatagagagaggaaa

SEQ ID NO: 3734 - RNA, 20 nt, synthetic construct
  source 1..20: mol_type = other RNA
tgtatctggaaggtacaggt

SEQ ID NO: 3735 - RNA, 20 nt, synthetic construct
  source 1..20: mol_type = other RNA
tgttaaatgggccactttcc

SEQ ID NO: 3736 - RNA, 20 nt, synthetic construct
  source 1..20: mol_type = other RNA
ttaaatgggccactttcctc

SEQ ID NO: 3737 - RNA, 20 nt, synthetic construct
  source 1..20: mol_type = other RNA
ttaacaggtctgtatctgga

SEQ ID NO: 3738 - RNA, 20 nt, synthetic construct
  source 1..20: mol_type = other RNA
ttcagggggtggactggggt

SEQ ID NO: 3739 - RNA, 20 nt, synthetic construct
  source 1..20: mol_type = other RNA
ttccagatacagacctgtta

SEQ ID NO: 3740 - RNA, 20 nt, synthetic construct
  source 1..20: mol_type = other RNA
ttcccaaatctcacctgtac

SEQ ID NO: 3741 - RNA, 20 nt, synthetic construct
  source 1..20: mol_type = other RNA
ttcctctctctatgatacag

SEQ ID NO: 3742 - RNA, 20 nt, synthetic construct
  source 1..20: mol_type = other RNA
tttaacaggtctgtatctgg

SEQ ID NO: 3743 - RNA, 20 nt, synthetic construct
  source 1..20: mol_type = other RNA
tttcagggggtggactgggg

SEQ ID NO: 3744 - RNA, 20 nt, synthetic construct
  source 1..20: mol_type = other RNA
tttcccaaatctcacctgta

SEQ ID NO: 3745 - RNA, 20 nt, synthetic construct
  source 1..20: mol_type = other RNA
tttcctctctctatgataca

SEQ ID NO: 3746 - RNA, 20 nt, synthetic construct
  source 1..20: mol_type = other RNA
ttttcagggggtggactggg

SEQ ID NO: 3747 - RNA, 20 nt, synthetic construct
  source 1..20: mol_type = other RNA
ttttcctctctctatgatac

SEQ ID NO: 3748 - RNA, 20 nt, synthetic construct
  source 1..20: mol_type = other RNA
tttttcagggggtggactgg

SEQ ID NO: 3749 - RNA, 20 nt, synthetic construct
  source 1..20: mol_type = other RNA
tttttcctctctctatgata

SEQ ID NO: 3750 - RNA, 20 nt, synthetic construct
  source 1..20: mol_type = other RNA
ttttttcagggggtggactg

SEQ ID NO: 3751 - RNA, 21 nt, synthetic construct
  source 1..21: mol_type = other RNA
aaaaaaggagctgaggaaagt

SEQ ID NO: 3752 - RNA, 21 nt, synthetic construct
  source 1..21: mol_type = other RNA
aaaaaggagctgaggaaagtg

SEQ ID NO: 3753 - RNA, 21 nt, synthetic construct
  source 1..21: mol_type = other RNA
aaaagctttcccaaatctcac

SEQ ID NO: 3754 - RNA, 21 nt, synthetic construct
  source 1..21: mol_type = other RNA
aaaaggagctgaggaaagtgg

SEQ ID NO: 3755 - RNA, 21 nt, synthetic construct
  source 1..21: mol_type = other RNA
aaagctttcccaaatctcacc

SEQ ID NO: 3756 - RNA, 21 nt, synthetic construct
  source 1..21: mol_type = other RNA
aaaggagctgaggaaagtggc

SEQ ID NO: 3757 - RNA, 21 nt, synthetic construct
  source 1..21: mol_type = other RNA
aaagtggcccatttaacaggt

SEQ ID NO: 3758 - RNA, 21 nt, synthetic construct
  source 1..21: mol_type = other RNA
aaatctcacctgtaccttcca

SEQ ID NO: 3759 - RNA, 21 nt, synthetic construct
  source 1..21: mol_type = other RNA
aaatgggccactttcctcagc

SEQ ID NO: 3760 - RNA, 21 nt, synthetic construct
  source 1..21: mol_type = other RNA
aacaggtctgtatctggaagg

SEQ ID NO: 3761 - RNA, 21 nt, synthetic construct
  source 1..21: mol_type = other RNA
aacatatatttttcctctctc

SEQ ID NO: 3762 - RNA, 21 nt, synthetic construct
  source 1..21: mol_type = other RNA
aagctttcccaaatctcacct

SEQ ID NO: 3763 - RNA, 21 nt, synthetic construct
  source 1..21: mol_type = other RNA
aaggagctgaggaaagtggcc

SEQ ID NO: 3764 - RNA, 21 nt, synthetic construct
  source 1..21: mol_type = other RNA
aaggtacaggtgagatttggg

SEQ ID NO: 3765 - RNA, 21 nt, synthetic construct
  source 1..21: mol_type = other RNA
aagtggcccatttaacaggtc

SEQ ID NO: 3766 - RNA, 21 nt, synthetic construct
  source 1..21: mol_type = other RNA
aatctcacctgtaccttccag

SEQ ID NO: 3767 - RNA, 21 nt, synthetic construct
  source 1..21: mol_type = other RNA
aatgggccactttcctcagct

SEQ ID NO: 3768 - RNA, 21 nt, synthetic construct
  source 1..21: mol_type = other RNA
acagacctgttaaatgggcca

SEQ ID NO: 3769 - RNA, 21 nt, synthetic construct
  source 1..21: mol_type = other RNA
acaggccaccccagtccaccc

SEQ ID NO: 3770 - RNA, 21 nt, synthetic construct
  source 1..21: mol_type = other RNA
acaggtctgtatctggaaggt

SEQ ID NO: 3771 - RNA, 21 nt, synthetic construct
  source 1..21: mol_type = other RNA
acatatatttttcctctctct

SEQ ID NO: 3772 - RNA, 21 nt, synthetic construct
  source 1..21: mol_type = other RNA
accccagtccaccccctgaaa

SEQ ID NO: 3773 - RNA, 21 nt, synthetic construct
  source 1..21: mol_type = other RNA
acctgtaccttccagatacag

SEQ ID NO: 3774 - RNA, 21 nt, synthetic construct
  source 1..21: mol_type = other RNA
acctgttaaatgggccacttt

SEQ ID NO: 3775 - RNA, 21 nt, synthetic construct
  source 1..21: mol_type = other RNA
accttccagatacagacctgt

SEQ ID NO: 3776 - RNA, 21 nt, synthetic construct
  source 1..21: mol_type = other RNA
actggggtggcctgtatcata

SEQ ID NO: 3777 - RNA, 21 nt, synthetic construct
  source 1..21: mol_type = other RNA
actttcctcagctcctttttt

SEQ ID NO: 3778 - RNA, 21 nt, synthetic construct
  source 1..21: mol_type = other RNA
agacctgttaaatgggccact

SEQ ID NO: 3779 - RNA, 21 nt, synthetic construct
  source 1..21: mol_type = other RNA
agagagaggaaaaatatatgt

SEQ ID NO: 3780 - RNA, 21 nt, synthetic construct
  source 1..21: mol_type = other RNA
agatacagacctgttaaatgg

SEQ ID NO: 3781 - RNA, 21 nt, synthetic construct
  source 1..21: mol_type = other RNA
agctgaggaaagtggcccatt

SEQ ID NO: 3782 - RNA, 21 nt, synthetic construct
  source 1..21: mol_type = other RNA
agctttcccaaatctcacctg

SEQ ID NO: 3783 - RNA, 21 nt, synthetic construct
  source 1..21: mol_type = other RNA
aggaaagtggcccatttaaca

SEQ ID NO: 3784 - RNA, 21 nt, synthetic construct
  source 1..21: mol_type = other RNA
aggagctgaggaaagtggccc

SEQ ID NO: 3785 - RNA, 21 nt, synthetic construct
  source 1..21: mol_type = other RNA
aggccaccccagtccaccccc

SEQ ID NO: 3786 - RNA, 21 nt, synthetic construct
  source 1..21: mol_type = other RNA
agggggtggactggggtggcc

SEQ ID NO: 3787 - RNA, 21 nt, synthetic construct
  source 1..21: mol_type = other RNA
aggtacaggtgagatttggga

SEQ ID NO: 3788 - RNA, 21 nt, synthetic construct
  source 1..21: mol_type = other RNA
aggtctgtatctggaaggtac

SEQ ID NO: 3789 - RNA, 21 nt, synthetic construct
  source 1..21: mol_type = other RNA
agtggcccatttaacaggtct

SEQ ID NO: 3790 - RNA, 21 nt, synthetic construct
  source 1..21: mol_type = other RNA
atacagacctgttaaatgggc

SEQ ID NO: 3791 - RNA, 21 nt, synthetic construct
  source 1..21: mol_type = other RNA
atacaggccaccccagtccac

SEQ ID NO: 3792 - RNA, 21 nt, synthetic construct
  source 1..21: mol_type = other RNA
atatttttcctctctctatga

SEQ ID NO: 3793 - RNA, 21 nt, synthetic construct
  source 1..21: mol_type = other RNA
atcatagagagaggaaaaata

SEQ ID NO: 3794 - RNA, 21 nt, synthetic construct
  source 1..21: mol_type = other RNA
atctcacctgtaccttccaga

SEQ ID NO: 3795 - RNA, 21 nt, synthetic construct
  source 1..21: mol_type = other RNA
atctggaaggtacaggtgaga

SEQ ID NO: 3796 - RNA, 21 nt, synthetic construct
  source 1..21: mol_type = other RNA
atgatacaggccaccccagtc

SEQ ID NO: 3797 - RNA, 21 nt, synthetic construct
  source 1..21: mol_type = other RNA
atgggccactttcctcagctc

SEQ ID NO: 3798 - RNA, 21 nt, synthetic construct
  source 1..21: mol_type = other RNA
atttaacaggtctgtatctgg

SEQ ID NO: 3799 - RNA, 21 nt, synthetic construct
  source 1..21: mol_type = other RNA
atttttcctctctctatgata

SEQ ID NO: 3800 - RNA, 21 nt, synthetic construct
  source 1..21: mol_type = other RNA
caaaagctttcccaaatctca

SEQ ID NO: 3801 - RNA, 21 nt, synthetic construct
  source 1..21: mol_type = other RNA
caaatctcacctgtaccttcc

SEQ ID NO: 3802 - RNA, 21 nt, synthetic construct
  source 1..21: mol_type = other RNA
caccccagtccaccccctgaa

SEQ ID NO: 3803 - RNA, 21 nt, synthetic construct
  source 1..21: mol_type = other RNA
cacctgtaccttccagataca

SEQ ID NO: 3804 - RNA, 21 nt, synthetic construct
  source 1..21: mol_type = other RNA
cactttcctcagctccttttt

SEQ ID NO: 3805 - RNA, 21 nt, synthetic construct
  source 1..21: mol_type = other RNA
cagacctgttaaatgggccac

SEQ ID NO: 3806 - RNA, 21 nt, synthetic construct
  source 1..21: mol_type = other RNA
cagatacagacctgttaaatg

SEQ ID NO: 3807 - RNA, 21 nt, synthetic construct
  source 1..21: mol_type = other RNA
caggccaccccagtccacccc

SEQ ID NO: 3808 - RNA, 21 nt, synthetic construct
  source 1..21: mol_type = other RNA
cagggggtggactggggtggc

SEQ ID NO: 3809 - RNA, 21 nt, synthetic construct
  source 1..21: mol_type = other RNA
caggtctgtatctggaaggta

SEQ ID NO: 3810 - RNA, 21 nt, synthetic construct
  source 1..21: mol_type = other RNA
catagagagaggaaaaatata

SEQ ID NO: 3811 - RNA, 21 nt, synthetic construct
  source 1..21: mol_type = other RNA
catatatttttcctctctcta

SEQ ID NO: 3812 - RNA, 21 nt, synthetic construct
  source 1..21: mol_type = other RNA
catttaacaggtctgtatctg

SEQ ID NO: 3813 - RNA, 21 nt, synthetic construct
  source 1..21: mol_type = other RNA
ccaaaagctttcccaaatctc

SEQ ID NO: 3814 - RNA, 21 nt, synthetic construct
  source 1..21: mol_type = other RNA
ccaaatctcacctgtaccttc

SEQ ID NO: 3815 - RNA, 21 nt, synthetic construct
  source 1..21: mol_type = other RNA
ccaccccagtccaccccctga

SEQ ID NO: 3816 - RNA, 21 nt, synthetic construct
  source 1..21: mol_type = other RNA
ccactttcctcagctcctttt

SEQ ID NO: 3817 - RNA, 21 nt, synthetic construct
  source 1..21: mol_type = other RNA
ccagatacagacctgttaaat

SEQ ID NO: 3818 - RNA, 21 nt, synthetic construct
  source 1..21: mol_type = other RNA
ccagtccaccccctgaaaaaa

SEQ ID NO: 3819 - RNA, 21 nt, synthetic construct
  source 1..21: mol_type = other RNA
ccatttaacaggtctgtatct

SEQ ID NO: 3820 - RNA, 21 nt, synthetic construct
  source 1..21: mol_type = other RNA
cccaaatctcacctgtacctt

SEQ ID NO: 3821 - RNA, 21 nt, synthetic construct
  source 1..21: mol_type = other RNA
cccagtccaccccctgaaaaa

SEQ ID NO: 3822 - RNA, 21 nt, synthetic construct
  source 1..21: mol_type = other RNA
cccatttaacaggtctgtatc

SEQ ID NO: 3823 - RNA, 21 nt, synthetic construct
  source 1..21: mol_type = other RNA
ccccagtccaccccctgaaaa

SEQ ID NO: 3824 - RNA, 21 nt, synthetic construct
  source 1..21: mol_type = other RNA
cctctctctatgatacaggcc

SEQ ID NO: 3825 - RNA, 21 nt, synthetic construct
  source 1..21: mol_type = other RNA
cctgtaccttccagatacaga

SEQ ID NO: 3826 - RNA, 21 nt, synthetic construct
  source 1..21: mol_type = other RNA
cctgtatcatagagagaggaa

SEQ ID NO: 3827 - RNA, 21 nt, synthetic construct
  source 1..21: mol_type = other RNA
cctgttaaatgggccactttc

SEQ ID NO: 3828 - RNA, 21 nt, synthetic construct
  source 1..21: mol_type = other RNA
ccttccagatacagacctgtt

SEQ ID NO: 3829 - RNA, 21 nt, synthetic construct
  source 1..21: mol_type = other RNA
ctatgatacaggccaccccag

SEQ ID NO: 3830 - RNA, 21 nt, synthetic construct
  source 1..21: mol_type = other RNA
ctcacctgtaccttccagata

SEQ ID NO: 3831 - RNA, 21 nt, synthetic construct
  source 1..21: mol_type = other RNA
ctctatgatacaggccacccc

SEQ ID NO: 3832 - RNA, 21 nt, synthetic construct
  source 1..21: mol_type = other RNA
ctctctatgatacaggccacc

SEQ ID NO: 3833 - RNA, 21 nt, synthetic construct
  source 1..21: mol_type = other RNA
ctctctctatgatacaggcca

SEQ ID NO: 3834 - RNA, 21 nt, synthetic construct
  source 1..21: mol_type = other RNA
ctgaggaaagtggcccattta

SEQ ID NO: 3835 - RNA, 21 nt, synthetic construct
  source 1..21: mol_type = other RNA
ctggaaggtacaggtgagatt

SEQ ID NO: 3836 - RNA, 21 nt, synthetic construct
  source 1..21: mol_type = other RNA
ctggggtggcctgtatcatag

SEQ ID NO: 3837 - RNA, 21 nt, synthetic construct
  source 1..21: mol_type = other RNA
ctgtaccttccagatacagac

SEQ ID NO: 3838 - RNA, 21 nt, synthetic construct
  source 1..21: mol_type = other RNA
ctgtatcatagagagaggaaa

SEQ ID NO: 3839 - RNA, 21 nt, synthetic construct
  source 1..21: mol_type = other RNA
ctgtatctggaaggtacaggt

SEQ ID NO: 3840 - RNA, 21 nt, synthetic construct
  source 1..21: mol_type = other RNA
ctgttaaatgggccactttcc

SEQ ID NO: 3841 - RNA, 21 nt, synthetic construct
  source 1..21: mol_type = other RNA
cttccagatacagacctgtta

SEQ ID NO: 3842 - RNA, 21 nt, synthetic construct
  source 1..21: mol_type = other RNA
ctttcccaaatctcacctgta

SEQ ID NO: 3843 - RNA, 21 nt, synthetic construct
  source 1..21: mol_type = other RNA
gaaagtggcccatttaacagg

SEQ ID NO: 3844 - RNA, 21 nt, synthetic construct
  source 1..21: mol_type = other RNA
gaaggtacaggtgagatttgg

SEQ ID NO: 3845 - RNA, 21 nt, synthetic construct
  source 1..21: mol_type = other RNA
gacctgttaaatgggccactt

SEQ ID NO: 3846 - RNA, 21 nt, synthetic construct
  source 1..21: mol_type = other RNA
gactggggtggcctgtatcat

SEQ ID NO: 3847 - RNA, 21 nt, synthetic construct
  source 1..21: mol_type = other RNA
gagagaggaaaaatatatgtt

SEQ ID NO: 3848 - RNA, 21 nt, synthetic construct
  source 1..21: mol_type = other RNA
gagctgaggaaagtggcccat

SEQ ID NO: 3849 - RNA, 21 nt, synthetic construct
  source 1..21: mol_type = other RNA
gaggaaagtggcccatttaac

SEQ ID NO: 3850 - RNA, 21 nt, synthetic construct
  source 1..21: mol_type = other RNA
gatacagacctgttaaatggg

SEQ ID NO: 3851 - RNA, 21 nt, synthetic construct
  source 1..21: mol_type = other RNA
gatacaggccaccccagtcca

SEQ ID NO: 3852 - RNA, 21 nt, synthetic construct
  source 1..21: mol_type = other RNA
gccaaaagctttcccaaatct

SEQ ID NO: 3853 - RNA, 21 nt, synthetic construct
  source 1..21: mol_type = other RNA
gccaccccagtccaccccctg

SEQ ID NO: 3854 - RNA, 21 nt, synthetic construct
  source 1..21: mol_type = other RNA
gccactttcctcagctccttt

SEQ ID NO: 3855 - RNA, 21 nt, synthetic construct
  source 1..21: mol_type = other RNA
gcccatttaacaggtctgtat

SEQ ID NO: 3856 - RNA, 21 nt, synthetic construct
  source 1..21: mol_type = other RNA
gcctgtatcatagagagagga

SEQ ID NO: 3857 - RNA, 21 nt, synthetic construct
  source 1..21: mol_type = other RNA
gctgaggaaagtggcccattt

SEQ ID NO: 3858 - RNA, 21 nt, synthetic construct
  source 1..21: mol_type = other RNA
gctttcccaaatctcacctgt

SEQ ID NO: 3859 - RNA, 21 nt, synthetic construct
  source 1..21: mol_type = other RNA
ggaaagtggcccatttaacag

SEQ ID NO: 3860 - RNA, 21 nt, synthetic construct
  source 1..21: mol_type = other RNA
ggaaggtacaggtgagatttg

SEQ ID NO: 3861 - RNA, 21 nt, synthetic construct
  source 1..21: mol_type = other RNA
ggactggggtggcctgtatca

SEQ ID NO: 3862 - RNA, 21 nt, synthetic construct
  source 1..21: mol_type = other RNA
ggagctgaggaaagtggccca

SEQ ID NO: 3863 - RNA, 21 nt, synthetic construct
  source 1..21: mol_type = other RNA
ggccaccccagtccaccccct

SEQ ID NO: 3864 - RNA, 21 nt, synthetic construct
  source 1..21: mol_type = other RNA
ggccactttcctcagctcctt

SEQ ID NO: 3865 - RNA, 21 nt, synthetic construct
  source 1..21: mol_type = other RNA
ggcccatttaacaggtctgta

SEQ ID NO: 3866 - RNA, 21 nt, synthetic construct
  source 1..21: mol_type = other RNA
ggcctgtatcatagagagagg

SEQ ID NO: 3867 - RNA, 21 nt, synthetic construct
  source 1..21: mol_type = other RNA
gggccactttcctcagctcct

SEQ ID NO: 3868 - RNA, 21 nt, synthetic construct
  source 1..21: mol_type = other RNA
gggggtggactggggtggcct

SEQ ID NO: 3869 - RNA, 21 nt, synthetic construct
  source 1..21: mol_type = other RNA
ggggtggactggggtggcctg

SEQ ID NO: 3870 - RNA, 21 nt, synthetic construct
  source 1..21: mol_type = other RNA
ggggtggcctgtatcatagag

SEQ ID NO: 3871 - RNA, 21 nt, synthetic construct
  source 1..21: mol_type = other RNA
gggtggactggggtggcctgt

SEQ ID NO: 3872 - RNA, 21 nt, synthetic construct
  source 1..21: mol_type = other RNA
gggtggcctgtatcatagaga

SEQ ID NO: 3873 - RNA, 21 nt, synthetic construct
  source 1..21: mol_type = other RNA
ggtacaggtgagatttgggaa

SEQ ID NO: 3874 - RNA, 21 nt, synthetic construct
  source 1..21: mol_type = other RNA
ggtctgtatctggaaggtaca

SEQ ID NO: 3875 - RNA, 21 nt, synthetic construct
  source 1..21: mol_type = other RNA
ggtggactggggtggcctgta

SEQ ID NO: 3876 - RNA, 21 nt, synthetic construct
  source 1..21: mol_type = other RNA
ggtggcctgtatcatagagag

SEQ ID NO: 3877 - RNA, 21 nt, synthetic construct
  source 1..21: mol_type = other RNA
gtacaggtgagatttgggaaa

SEQ ID NO: 3878 - RNA, 21 nt, synthetic construct
  source 1..21: mol_type = other RNA
gtaccttccagatacagacct

SEQ ID NO: 3879 - RNA, 21 nt, synthetic construct
  source 1..21: mol_type = other RNA
gtatcatagagagaggaaaaa

SEQ ID NO: 3880 - RNA, 21 nt, synthetic construct
  source 1..21: mol_type = other RNA
gtatctggaaggtacaggtga

SEQ ID NO: 3881 - RNA, 21 nt, synthetic construct
  source 1..21: mol_type = other RNA
gtctgtatctggaaggtacag

SEQ ID NO: 3882 - RNA, 21 nt, synthetic construct
  source 1..21: mol_type = other RNA
gtggactggggtggcctgtat

SEQ ID NO: 3883 - RNA, 21 nt, synthetic construct
  source 1..21: mol_type = other RNA
gtggcccatttaacaggtctg

SEQ ID NO: 3884 - RNA, 21 nt, synthetic construct
  source 1..21: mol_type = other RNA
gtggcctgtatcatagagaga

SEQ ID NO: 3885 - RNA, 21 nt, synthetic construct
  source 1..21: mol_type = other RNA
gttaaatgggccactttcctc

SEQ ID NO: 3886 - RNA, 21 nt, synthetic construct
  source 1..21: mol_type = other RNA
taaatgggccactttcctcag

SEQ ID NO: 3887 - RNA, 21 nt, synthetic construct
  source 1..21: mol_type = other RNA
taacaggtctgtatctggaag

SEQ ID NO: 3888 - RNA, 21 nt, synthetic construct
  source 1..21: mol_type = other RNA
tacagacctgttaaatgggcc

SEQ ID NO: 3889 - RNA, 21 nt, synthetic construct
  source 1..21: mol_type = other RNA
tacaggccaccccagtccacc

SEQ ID NO: 3890 - RNA, 21 nt, synthetic construct
  source 1..21: mol_type = other RNA
tacaggtgagatttgggaaag

SEQ ID NO: 3891 - RNA, 21 nt, synthetic construct
  source 1..21: mol_type = other RNA
taccttccagatacagacctg

SEQ ID NO: 3892 - RNA, 21 nt, synthetic construct
  source 1..21: mol_type = other RNA
tagagagaggaaaaatatatg

SEQ ID NO: 3893 - RNA, 21 nt, synthetic construct
  source 1..21: mol_type = other RNA
tatatttttcctctctctatg

SEQ ID NO: 3894 - RNA, 21 nt, synthetic construct
  source 1..21: mol_type = other RNA
tatcatagagagaggaaaaat

SEQ ID NO: 3895 - RNA, 21 nt, synthetic construct
  source 1..21: mol_type = other RNA
tatctggaaggtacaggtgag

SEQ ID NO: 3896 - RNA, 21 nt, synthetic construct
  source 1..21: mol_type = other RNA
tatgatacaggccaccccagt

SEQ ID NO: 3897 - RNA, 21 nt, synthetic construct
  source 1..21: mol_type = other RNA
tatttttcctctctctatgat

SEQ ID NO: 3898 - RNA, 21 nt, synthetic construct
  source 1..21: mol_type = other RNA
tcacctgtaccttccagatac

SEQ ID NO: 3899 - RNA, 21 nt, synthetic construct
  source 1..21: mol_type = other RNA
tcagggggtggactggggtgg

SEQ ID NO: 3900 - RNA, 21 nt, synthetic construct
  source 1..21: mol_type = other RNA
tcatagagagaggaaaaatat

SEQ ID NO: 3901 - RNA, 21 nt, synthetic construct
  source 1..21: mol_type = other RNA
tccagatacagacctgttaaa

SEQ ID NO: 3902 - RNA, 21 nt, synthetic construct
  source 1..21: mol_type = other RNA
tcccaaatctcacctgtacct

SEQ ID NO: 3903 - RNA, 21 nt, synthetic construct
  source 1..21: mol_type = other RNA
tcctctctctatgatacaggc

SEQ ID NO: 3904 - RNA, 21 nt, synthetic construct
  source 1..21: mol_type = other RNA
tctatgatacaggccacccca

SEQ ID NO: 3905 - RNA, 21 nt, synthetic construct
  source 1..21: mol_type = other RNA
tctcacctgtaccttccagat

SEQ ID NO: 3906 - RNA, 21 nt, synthetic construct
  source 1..21: mol_type = other RNA
tctctatgatacaggccaccc

SEQ ID NO: 3907 - RNA, 21 nt, synthetic construct
  source 1..21: mol_type = other RNA
tctctctatgatacaggccac

SEQ ID NO: 3908 - RNA, 21 nt, synthetic construct
  source 1..21: mol_type = other RNA
tctggaaggtacaggtgagat

SEQ ID NO: 3909 - RNA, 21 nt, synthetic construct
  source 1..21: mol_type = other RNA
tctgtatctggaaggtacagg

SEQ ID NO: 3910 - RNA, 21 nt, synthetic construct
  source 1..21: mol_type = other RNA
tgaggaaagtggcccatttaa

SEQ ID NO: 3911 - RNA, 21 nt, synthetic construct
  source 1..21: mol_type = other RNA
tgatacaggccaccccagtcc

SEQ ID NO: 3912 - RNA, 21 nt, synthetic construct
  source 1..21: mol_type = other RNA
tggaaggtacaggtgagattt

SEQ ID NO: 3913 - RNA, 21 nt, synthetic construct
  source 1..21: mol_type = other RNA
tggactggggtggcctgtatc

SEQ ID NO: 3914 - RNA, 21 nt, synthetic construct
  source 1..21: mol_type = other RNA
tggcccatttaacaggtctgt

SEQ ID NO: 3915 - RNA, 21 nt, synthetic construct
  source 1..21: mol_type = other RNA
tggcctgtatcatagagagag

SEQ ID NO: 3916 - RNA, 21 nt, synthetic construct
  source 1..21: mol_type = other RNA
tgggccactttcctcagctcc

SEQ ID NO: 3917 - RNA, 21 nt, synthetic construct
  source 1..21: mol_type = other RNA
tggggtggcctgtatcataga

SEQ ID NO: 3918 - RNA, 21 nt, synthetic construct
  source 1..21: mol_type = other RNA
tgtaccttccagatacagacc

SEQ ID NO: 3919 - RNA, 21 nt, synthetic construct
  source 1..21: mol_type = other RNA
tgtatcatagagagaggaaaa

SEQ ID NO: 3920 - RNA, 21 nt, synthetic construct
  source 1..21: mol_type = other RNA
tgtatctggaaggtacaggtg

SEQ ID NO: 3921 - RNA, 21 nt, synthetic construct
  source 1..21: mol_type = other RNA
tgttaaatgggccactttcct

SEQ ID NO: 3922 - RNA, 21 nt, synthetic construct
  source 1..21: mol_type = other RNA
ttaaatgggccactttcctca

SEQ ID NO: 3923 - RNA, 21 nt, synthetic construct
  source 1..21: mol_type = other RNA
ttaacaggtctgtatctggaa

SEQ ID NO: 3924 - RNA, 21 nt, synthetic construct
  source 1..21: mol_type = other RNA
ttcagggggtggactggggtg

SEQ ID NO: 3925 - RNA, 21 nt, synthetic construct
  source 1..21: mol_type = other RNA
ttccagatacagacctgttaa

SEQ ID NO: 3926 - RNA, 21 nt, synthetic construct
  source 1..21: mol_type = other RNA
ttcccaaatctcacctgtacc

SEQ ID NO: 3927 - RNA, 21 nt, synthetic construct
  source 1..21: mol_type = other RNA
ttcctctctctatgatacagg

SEQ ID NO: 3928 - RNA, 21 nt, synthetic construct
  source 1..21: mol_type = other RNA
tttaacaggtctgtatctgga

SEQ ID NO: 3929 - RNA, 21 nt, synthetic construct
  source 1..21: mol_type = other RNA
tttcagggggtggactggggt

SEQ ID NO: 3930 - RNA, 21 nt, synthetic construct
  source 1..21: mol_type = other RNA
tttcccaaatctcacctgtac

SEQ ID NO: 3931 - RNA, 21 nt, synthetic construct
  source 1..21: mol_type = other RNA
tttcctctctctatgatacag

SEQ ID NO: 3932 - RNA, 21 nt, synthetic construct
  source 1..21: mol_type = other RNA
ttttcagggggtggactgggg

SEQ ID NO: 3933 - RNA, 21 nt, synthetic construct
  source 1..21: mol_type = other RNA
ttttcctctctctatgataca

SEQ ID NO: 3934 - RNA, 21 nt, synthetic construct
  source 1..21: mol_type = other RNA
tttttcagggggtggactggg

SEQ ID NO: 3935 - RNA, 21 nt, synthetic construct
  source 1..21: mol_type = other RNA
tttttcctctctctatgatac

SEQ ID NO: 3936 - RNA, 21 nt, synthetic construct
  source 1..21: mol_type = other RNA
ttttttcagggggtggactgg

SEQ ID NO: 3937 - RNA, 22 nt, synthetic construct
  source 1..22: mol_type = other RNA
aaaaaaggagctgaggaaagtg

SEQ ID NO: 3938 - RNA, 22 nt, synthetic construct
  source 1..22: mol_type = other RNA
aaaaaggagctgaggaaagtgg

SEQ ID NO: 3939 - RNA, 22 nt, synthetic construct
  source 1..22: mol_type = other RNA
aaaagctttcccaaatctcacc

SEQ ID NO: 3940 - RNA, 22 nt, synthetic construct
  source 1..22: mol_type = other RNA
aaaaggagctgaggaaagtggc

SEQ ID NO: 3941 - RNA, 22 nt, synthetic construct
  source 1..22: mol_type = other RNA
aaagctttcccaaatctcacct

SEQ ID NO: 3942 - RNA, 22 nt, synthetic construct
  source 1..22: mol_type = other RNA
aaaggagctgaggaaagtggcc

SEQ ID NO: 3943 - RNA, 22 nt, synthetic construct
  source 1..22: mol_type = other RNA
aaagtggcccatttaacaggtc

SEQ ID NO: 3944 - RNA, 22 nt, synthetic construct
  source 1..22: mol_type = other RNA
aaatctcacctgtaccttccag

SEQ ID NO: 3945 - RNA, 22 nt, synthetic construct
  source 1..22: mol_type = other RNA
aaatgggccactttcctcagct

SEQ ID NO: 3946 - RNA, 22 nt, synthetic construct
  source 1..22: mol_type = other RNA
aacaggtctgtatctggaaggt

SEQ ID NO: 3947 - RNA, 22 nt, synthetic construct
  source 1..22: mol_type = other RNA
aacatatatttttcctctctct

SEQ ID NO: 3948 - RNA, 22 nt, synthetic construct
  source 1..22: mol_type = other RNA
aagctttcccaaatctcacctg

SEQ ID NO: 3949 - RNA, 22 nt, synthetic construct
  source 1..22: mol_type = other RNA
aaggagctgaggaaagtggccc

SEQ ID NO: 3950 - RNA, 22 nt, synthetic construct
  source 1..22: mol_type = other RNA
aaggtacaggtgagatttggga

SEQ ID NO: 3951 - RNA, 22 nt, synthetic construct
  source 1..22: mol_type = other RNA
aagtggcccatttaacaggtct

SEQ ID NO: 3952 - RNA, 22 nt, synthetic construct
  source 1..22: mol_type = other RNA
aatctcacctgtaccttccaga

SEQ ID NO: 3953 - RNA, 22 nt, synthetic construct
  source 1..22: mol_type = other RNA
aatgggccactttcctcagctc

SEQ ID NO: 3954 - RNA, 22 nt, synthetic construct
  source 1..22: mol_type = other RNA
acagacctgttaaatgggccac

SEQ ID NO: 3955 - RNA, 22 nt, synthetic construct
  source 1..22: mol_type = other RNA
acaggccaccccagtccacccc

SEQ ID NO: 3956 - RNA, 22 nt, synthetic construct
  source 1..22: mol_type = other RNA
acaggtctgtatctggaaggta

SEQ ID NO: 3957 - RNA, 22 nt, synthetic construct
  source 1..22: mol_type = other RNA
acatatatttttcctctctcta

SEQ ID NO: 3958 - RNA, 22 nt, synthetic construct
  source 1..22: mol_type = other RNA
accccagtccaccccctgaaaa

SEQ ID NO: 3959 - RNA, 22 nt, synthetic construct
  source 1..22: mol_type = other RNA
acctgtaccttccagatacaga

SEQ ID NO: 3960 - RNA, 22 nt, synthetic construct
  source 1..22: mol_type = other RNA
acctgttaaatgggccactttc

SEQ ID NO: 3961 - RNA, 22 nt, synthetic construct
  source 1..22: mol_type = other RNA
accttccagatacagacctgtt

SEQ ID NO: 3962 - RNA, 22 nt, synthetic construct
  source 1..22: mol_type = other RNA
actggggtggcctgtatcatag

SEQ ID NO: 3963 - RNA, 22 nt, synthetic construct
  source 1..22: mol_type = other RNA
agacctgttaaatgggccactt

SEQ ID NO: 3964 - RNA, 22 nt, synthetic construct
  source 1..22: mol_type = other RNA
agagagaggaaaaatatatgtt

SEQ ID NO: 3965 - RNA, 22 nt, synthetic construct
  source 1..22: mol_type = other RNA
agatacagacctgttaaatggg

SEQ ID NO: 3966 - RNA, 22 nt, synthetic construct
  source 1..22: mol_type = other RNA
agctgaggaaagtggcccattt

SEQ ID NO: 3967 - RNA, 22 nt, synthetic construct
  source 1..22: mol_type = other RNA
agctttcccaaatctcacctgt

SEQ ID NO: 3968 - RNA, 22 nt, synthetic construct
  source 1..22: mol_type = other RNA
aggaaagtggcccatttaacag

SEQ ID NO: 3969 - RNA, 22 nt, synthetic construct
  source 1..22: mol_type = other RNA
aggagctgaggaaagtggccca

SEQ ID NO: 3970 - RNA, 22 nt, synthetic construct
  source 1..22: mol_type = other RNA
aggccaccccagtccaccccct

SEQ ID NO: 3971 - RNA, 22 nt, synthetic construct
  source 1..22: mol_type = other RNA
agggggtggactggggtggcct

SEQ ID NO: 3972 - RNA, 22 nt, synthetic construct
  source 1..22: mol_type = other RNA
aggtacaggtgagatttgggaa

SEQ ID NO: 3973 - RNA, 22 nt, synthetic construct
  source 1..22: mol_type = other RNA
aggtctgtatctggaaggtaca

SEQ ID NO: 3974 - RNA, 22 nt, synthetic construct
  source 1..22: mol_type = other RNA
agtggcccatttaacaggtctg

SEQ ID NO: 3975 - RNA, 22 nt, synthetic construct
  source 1..22: mol_type = other RNA
atacagacctgttaaatgggcc

SEQ ID NO: 3976 - RNA, 22 nt, synthetic construct
  source 1..22: mol_type = other RNA
atacaggccaccccagtccacc

SEQ ID NO: 3977 - RNA, 22 nt, synthetic construct
  source 1..22: mol_type = other RNA
atagagagaggaaaaatatatg

SEQ ID NO: 3978 - RNA, 22 nt, synthetic construct
  source 1..22: mol_type = other RNA
atatatttttcctctctctatg

SEQ ID NO: 3979 - RNA, 22 nt, synthetic construct
  source 1..22: mol_type = other RNA
atatttttcctctctctatgat

SEQ ID NO: 3980 - RNA, 22 nt, synthetic construct
  source 1..22: mol_type = other RNA
atcatagagagaggaaaaatat

SEQ ID NO: 3981 - RNA, 22 nt, synthetic construct
  source 1..22: mol_type = other RNA
atctcacctgtaccttccagat

SEQ ID NO: 3982 - RNA, 22 nt, synthetic construct
  source 1..22: mol_type = other RNA
atctggaaggtacaggtgagat

SEQ ID NO: 3983 - RNA, 22 nt, synthetic construct
  source 1..22: mol_type = other RNA
atgatacaggccaccccagtcc

SEQ ID NO: 3984 - RNA, 22 nt, synthetic construct
  source 1..22: mol_type = other RNA
atgggccactttcctcagctcc

SEQ ID NO: 3985 - RNA, 22 nt, synthetic construct
  source 1..22: mol_type = other RNA
atttaacaggtctgtatctgga

SEQ ID NO: 3986 - RNA, 22 nt, synthetic construct
  source 1..22: mol_type = other RNA
atttttcctctctctatgatac

SEQ ID NO: 3987 - RNA, 22 nt, synthetic construct
  source 1..22: mol_type = other RNA
caaaagctttcccaaatctcac

SEQ ID NO: 3988 - RNA, 22 nt, synthetic construct
  source 1..22: mol_type = other RNA
caaatctcacctgtaccttcca

SEQ ID NO: 3989 - RNA, 22 nt, synthetic construct
  source 1..22: mol_type = other RNA
caccccagtccaccccctgaaa

SEQ ID NO: 3990 - RNA, 22 nt, synthetic construct
  source 1..22: mol_type = other RNA
cacctgtaccttccagatacag

SEQ ID NO: 3991 - RNA, 22 nt, synthetic construct
  source 1..22: mol_type = other RNA
cactttcctcagctcctttttt

SEQ ID NO: 3992 - RNA, 22 nt, synthetic construct
  source 1..22: mol_type = other RNA
cagacctgttaaatgggccact

SEQ ID NO: 3993 - RNA, 22 nt, synthetic construct
  source 1..22: mol_type = other RNA
cagatacagacctgttaaatgg

SEQ ID NO: 3994 - RNA, 22 nt, synthetic construct
  source 1..22: mol_type = other RNA
caggccaccccagtccaccccc

SEQ ID NO: 3995 - RNA, 22 nt, synthetic construct
  source 1..22: mol_type = other RNA
cagggggtggactggggtggcc

SEQ ID NO: 3996 - RNA, 22 nt, synthetic construct
  source 1..22: mol_type = other RNA
caggtctgtatctggaaggtac

SEQ ID NO: 3997 - RNA, 22 nt, synthetic construct
  source 1..22: mol_type = other RNA
catagagagaggaaaaatatat

SEQ ID NO: 3998 - RNA, 22 nt, synthetic construct
  source 1..22: mol_type = other RNA
catatatttttcctctctctat

SEQ ID NO: 3999 - RNA, 22 nt, synthetic construct
  source 1..22: mol_type = other RNA
catttaacaggtctgtatctgg

SEQ ID NO: 4000 - RNA, 22 nt, synthetic construct
  source 1..22: mol_type = other RNA
ccaaaagctttcccaaatctca

SEQ ID NO: 4001 - RNA, 22 nt, synthetic construct
  source 1..22: mol_type = other RNA
ccaaatctcacctgtaccttcc

SEQ ID NO: 4002 - RNA, 22 nt, synthetic construct
  source 1..22: mol_type = other RNA
ccaccccagtccaccccctgaa

SEQ ID NO: 4003 - RNA, 22 nt, synthetic construct
  source 1..22: mol_type = other RNA
ccactttcctcagctccttttt

SEQ ID NO: 4004 - RNA, 22 nt, synthetic construct
  source 1..22: mol_type = other RNA
ccagatacagacctgttaaatg

SEQ ID NO: 4005 - RNA, 22 nt, synthetic construct
  source 1..22: mol_type = other RNA
ccatttaacaggtctgtatctg

SEQ ID NO: 4006 - RNA, 22 nt, synthetic construct
  source 1..22: mol_type = other RNA
cccaaatctcacctgtaccttc

SEQ ID NO: 4007 - RNA, 22 nt, synthetic construct
  source 1..22: mol_type = other RNA
cccagtccaccccctgaaaaaa

SEQ ID NO: 4008 - RNA, 22 nt, synthetic construct
  source 1..22: mol_type = other RNA
cccatttaacaggtctgtatct

SEQ ID NO: 4009 - RNA, 22 nt, synthetic construct
  source 1..22: mol_type = other RNA
ccccagtccaccccctgaaaaa

SEQ ID NO: 4010 - RNA, 22 nt, synthetic construct
  source 1..22: mol_type = other RNA
cctctctctatgatacaggcca

SEQ ID NO: 4011 - RNA, 22 nt, synthetic construct
  source 1..22: mol_type = other RNA
cctgtaccttccagatacagac

SEQ ID NO: 4012 - RNA, 22 nt, synthetic construct
  source 1..22: mol_type = other RNA
cctgtatcatagagagaggaaa

SEQ ID NO: 4013 - RNA, 22 nt, synthetic construct
  source 1..22: mol_type = other RNA
cctgttaaatgggccactttcc

SEQ ID NO: 4014 - RNA, 22 nt, synthetic construct
  source 1..22: mol_type = other RNA
ccttccagatacagacctgtta

SEQ ID NO: 4015 - RNA, 22 nt, synthetic construct
  source 1..22: mol_type = other RNA
ctatgatacaggccaccccagt

SEQ ID NO: 4016 - RNA, 22 nt, synthetic construct
  source 1..22: mol_type = other RNA
ctcacctgtaccttccagatac

SEQ ID NO: 4017 - RNA, 22 nt, synthetic construct
  source 1..22: mol_type = other RNA
ctctatgatacaggccacccca

SEQ ID NO: 4018 - RNA, 22 nt, synthetic construct
  source 1..22: mol_type = other RNA
ctctctatgatacaggccaccc

SEQ ID NO: 4019 - RNA, 22 nt, synthetic construct
  source 1..22: mol_type = other RNA
ctctctctatgatacaggccac

SEQ ID NO: 4020 - RNA, 22 nt, synthetic construct
  source 1..22: mol_type = other RNA
ctgaggaaagtggcccatttaa

SEQ ID NO: 4021 - RNA, 22 nt, synthetic construct
  source 1..22: mol_type = other RNA
ctggaaggtacaggtgagattt

SEQ ID NO: 4022 - RNA, 22 nt, synthetic construct
  source 1..22: mol_type = other RNA
ctggggtggcctgtatcataga

SEQ ID NO: 4023 - RNA, 22 nt, synthetic construct
  source 1..22: mol_type = other RNA
ctgtaccttccagatacagacc

SEQ ID NO: 4024 - RNA, 22 nt, synthetic construct
  source 1..22: mol_type = other RNA
ctgtatcatagagagaggaaaa

SEQ ID NO: 4025 - RNA, 22 nt, synthetic construct
  source 1..22: mol_type = other RNA
ctgtatctggaaggtacaggtg

SEQ ID NO: 4026 - RNA, 22 nt, synthetic construct
  source 1..22: mol_type = other RNA
ctgttaaatgggccactttcct

SEQ ID NO: 4027 - RNA, 22 nt, synthetic construct
  source 1..22: mol_type = other RNA
cttccagatacagacctgttaa

SEQ ID NO: 4028 - RNA, 22 nt, synthetic construct
  source 1..22: mol_type = other RNA
ctttcccaaatctcacctgtac

SEQ ID NO: 4029 - RNA, 22 nt, synthetic construct
  source 1..22: mol_type = other RNA
gaaagtggcccatttaacaggt

SEQ ID NO: 4030 - RNA, 22 nt, synthetic construct
  source 1..22: mol_type = other RNA
gaaggtacaggtgagatttggg

SEQ ID NO: 4031 - RNA, 22 nt, synthetic construct
  source 1..22: mol_type = other RNA
gacctgttaaatgggccacttt

SEQ ID NO: 4032 - RNA, 22 nt, synthetic construct
  source 1..22: mol_type = other RNA
gactggggtggcctgtatcata

SEQ ID NO: 4033 - RNA, 22 nt, synthetic construct
  source 1..22: mol_type = other RNA
gagagaggaaaaatatatgtta

SEQ ID NO: 4034 - RNA, 22 nt, synthetic construct
  source 1..22: mol_type = other RNA
gagctgaggaaagtggcccatt

SEQ ID NO: 4035 - RNA, 22 nt, synthetic construct
  source 1..22: mol_type = other RNA
gaggaaagtggcccatttaaca

SEQ ID NO: 4036 - RNA, 22 nt, synthetic construct
  source 1..22: mol_type = other RNA
gatacagacctgttaaatgggc

SEQ ID NO: 4037 - RNA, 22 nt, synthetic construct
  source 1..22: mol_type = other RNA
gatacaggccaccccagtccac

SEQ ID NO: 4038 - RNA, 22 nt, synthetic construct
  source 1..22: mol_type = other RNA
gccaaaagctttcccaaatctc

SEQ ID NO: 4039 - RNA, 22 nt, synthetic construct
  source 1..22: mol_type = other RNA
gccaccccagtccaccccctga

SEQ ID NO: 4040 - RNA, 22 nt, synthetic construct
  source 1..22: mol_type = other RNA
gccactttcctcagctcctttt

SEQ ID NO: 4041 - RNA, 22 nt, synthetic construct
  source 1..22: mol_type = other RNA
gcccatttaacaggtctgtatc

SEQ ID NO: 4042 - RNA, 22 nt, synthetic construct
  source 1..22: mol_type = other RNA
gcctgtatcatagagagaggaa

SEQ ID NO: 4043 - RNA, 22 nt, synthetic construct
  source 1..22: mol_type = other RNA
gctgaggaaagtggcccattta

SEQ ID NO: 4044 - RNA, 22 nt, synthetic construct
  source 1..22: mol_type = other RNA
gctttcccaaatctcacctgta

SEQ ID NO: 4045 - RNA, 22 nt, synthetic construct
  source 1..22: mol_type = other RNA
ggaaagtggcccatttaacagg

SEQ ID NO: 4046 - RNA, 22 nt, synthetic construct
  source 1..22: mol_type = other RNA
ggaaggtacaggtgagatttgg

SEQ ID NO: 4047 - RNA, 22 nt, synthetic construct
  source 1..22: mol_type = other RNA
ggactggggtggcctgtatcat

SEQ ID NO: 4048 - RNA, 22 nt, synthetic construct
  source 1..22: mol_type = other RNA
ggagctgaggaaagtggcccat

SEQ ID NO: 4049 - RNA, 22 nt, synthetic construct
  source 1..22: mol_type = other RNA
ggccaccccagtccaccccctg

SEQ ID NO: 4050 - RNA, 22 nt, synthetic construct
  source 1..22: mol_type = other RNA
ggccactttcctcagctccttt

SEQ ID NO: 4051 - RNA, 22 nt, synthetic construct
  source 1..22: mol_type = other RNA
ggcccatttaacaggtctgtat

SEQ ID NO: 4052 - RNA, 22 nt, synthetic construct
  source 1..22: mol_type = other RNA
ggcctgtatcatagagagagga

SEQ ID NO: 4053 - RNA, 22 nt, synthetic construct
  source 1..22: mol_type = other RNA
gggccactttcctcagctcctt

SEQ ID NO: 4054 - RNA, 22 nt, synthetic construct
  source 1..22: mol_type = other RNA
gggggtggactggggtggcctg

SEQ ID NO: 4055 - RNA, 22 nt, synthetic construct
  source 1..22: mol_type = other RNA
ggggtggactggggtggcctgt

SEQ ID NO: 4056 - RNA, 22 nt, synthetic construct
  source 1..22: mol_type = other RNA
ggggtggcctgtatcatagaga

SEQ ID NO: 4057 - RNA, 22 nt, synthetic construct
  source 1..22: mol_type = other RNA
gggtggactggggtggcctgta

SEQ ID NO: 4058 - RNA, 22 nt, synthetic construct
  source 1..22: mol_type = other RNA
gggtggcctgtatcatagagag

SEQ ID NO: 4059 - RNA, 22 nt, synthetic construct
  source 1..22: mol_type = other RNA
ggtacaggtgagatttgggaaa

SEQ ID NO: 4060 - RNA, 22 nt, synthetic construct
  source 1..22: mol_type = other RNA
ggtctgtatctggaaggtacag

SEQ ID NO: 4061 - RNA, 22 nt, synthetic construct
  source 1..22: mol_type = other RNA
ggtggactggggtggcctgtat

SEQ ID NO: 4062 - RNA, 22 nt, synthetic construct
  source 1..22: mol_type = other RNA
ggtggcctgtatcatagagaga

SEQ ID NO: 4063 - RNA, 22 nt, synthetic construct
  source 1..22: mol_type = other RNA
gtacaggtgagatttgggaaag

SEQ ID NO: 4064 - RNA, 22 nt, synthetic construct
  source 1..22: mol_type = other RNA
gtaccttccagatacagacctg

SEQ ID NO: 4065 - RNA, 22 nt, synthetic construct
  source 1..22: mol_type = other RNA
gtatcatagagagaggaaaaat

SEQ ID NO: 4066 - RNA, 22 nt, synthetic construct
  source 1..22: mol_type = other RNA
gtatctggaaggtacaggtgag

SEQ ID NO: 4067 - RNA, 22 nt, synthetic construct
  source 1..22: mol_type = other RNA
gtctgtatctggaaggtacagg

SEQ ID NO: 4068 - RNA, 22 nt, synthetic construct
  source 1..22: mol_type = other RNA
gtggactggggtggcctgtatc

SEQ ID NO: 4069 - RNA, 22 nt, synthetic construct
  source 1..22: mol_type = other RNA
gtggcccatttaacaggtctgt

SEQ ID NO: 4070 - RNA, 22 nt, synthetic construct
  source 1..22: mol_type = other RNA
gtggcctgtatcatagagagag

SEQ ID NO: 4071 - RNA, 22 nt, synthetic construct
  source 1..22: mol_type = other RNA
gttaaatgggccactttcctca

SEQ ID NO: 4072 - RNA, 22 nt, synthetic construct
  source 1..22: mol_type = other RNA
taaatgggccactttcctcagc

SEQ ID NO: 4073 - RNA, 22 nt, synthetic construct
  source 1..22: mol_type = other RNA
taacaggtctgtatctggaagg

SEQ ID NO: 4074 - RNA, 22 nt, synthetic construct
  source 1..22: mol_type = other RNA
taacatatatttttcctctctc

SEQ ID NO: 4075 - RNA, 22 nt, synthetic construct
  source 1..22: mol_type = other RNA
tacagacctgttaaatgggcca

SEQ ID NO: 4076 - RNA, 22 nt, synthetic construct
  source 1..22: mol_type = other RNA
tacaggccaccccagtccaccc

SEQ ID NO: 4077 - RNA, 22 nt, synthetic construct
  source 1..22: mol_type = other RNA
taccttccagatacagacctgt

SEQ ID NO: 4078 - RNA, 22 nt, synthetic construct
  source 1..22: mol_type = other RNA
tagagagaggaaaaatatatgt

SEQ ID NO: 4079 - RNA, 22 nt, synthetic construct
  source 1..22: mol_type = other RNA
tatatttttcctctctctatga

SEQ ID NO: 4080 - RNA, 22 nt, synthetic construct
  source 1..22: mol_type = other RNA
tatcatagagagaggaaaaata

SEQ ID NO: 4081 - RNA, 22 nt, synthetic construct
  source 1..22: mol_type = other RNA
tatctggaaggtacaggtgaga

SEQ ID NO: 4082 - RNA, 22 nt, synthetic construct
  source 1..22: mol_type = other RNA
tatgatacaggccaccccagtc

SEQ ID NO: 4083 - RNA, 22 nt, synthetic construct
  source 1..22: mol_type = other RNA
tatttttcctctctctatgata

SEQ ID NO: 4084 - RNA, 22 nt, synthetic construct
  source 1..22: mol_type = other RNA
tcacctgtaccttccagataca

SEQ ID NO: 4085 - RNA, 22 nt, synthetic construct
  source 1..22: mol_type = other RNA
tcagggggtggactggggtggc

SEQ ID NO: 4086 - RNA, 22 nt, synthetic construct
  source 1..22: mol_type = other RNA
tcatagagagaggaaaaatata

SEQ ID NO: 4087 - RNA, 22 nt, synthetic construct
  source 1..22: mol_type = other RNA
tccagatacagacctgttaaat

SEQ ID NO: 4088 - RNA, 22 nt, synthetic construct
  source 1..22: mol_type = other RNA
tcccaaatctcacctgtacctt

SEQ ID NO: 4089 - RNA, 22 nt, synthetic construct
  source 1..22: mol_type = other RNA
tcctctctctatgatacaggcc

SEQ ID NO: 4090 - RNA, 22 nt, synthetic construct
  source 1..22: mol_type = other RNA
tctatgatacaggccaccccag

SEQ ID NO: 4091 - RNA, 22 nt, synthetic construct
  source 1..22: mol_type = other RNA
tctcacctgtaccttccagata

SEQ ID NO: 4092 - RNA, 22 nt, synthetic construct
  source 1..22: mol_type = other RNA
tctctatgatacaggccacccc

SEQ ID NO: 4093 - RNA, 22 nt, synthetic construct
  source 1..22: mol_type = other RNA
tctctctatgatacaggccacc

SEQ ID NO: 4094 - RNA, 22 nt, synthetic construct
  source 1..22: mol_type = other RNA
tctggaaggtacaggtgagatt

SEQ ID NO: 4095 - RNA, 22 nt, synthetic construct
  source 1..22: mol_type = other RNA
tctgtatctggaaggtacaggt

SEQ ID NO: 4096 - RNA, 22 nt, synthetic construct
  source 1..22: mol_type = other RNA
tgaggaaagtggcccatttaac

SEQ ID NO: 4097 - RNA, 22 nt, synthetic construct
  source 1..22: mol_type = other RNA
tgatacaggccaccccagtcca

SEQ ID NO: 4098 - RNA, 22 nt, synthetic construct
  source 1..22: mol_type = other RNA
tggaaggtacaggtgagatttg

SEQ ID NO: 4099 - RNA, 22 nt, synthetic construct
  source 1..22: mol_type = other RNA
tggactggggtggcctgtatca

SEQ ID NO: 4100 - RNA, 22 nt, synthetic construct
  source 1..22: mol_type = other RNA
tggcccatttaacaggtctgta

SEQ ID NO: 4101 - RNA, 22 nt, synthetic construct
  source 1..22: mol_type = other RNA
tggcctgtatcatagagagagg

SEQ ID NO: 4102 - RNA, 22 nt, synthetic construct
  source 1..22: mol_type = other RNA
tgggccactttcctcagctcct

SEQ ID NO: 4103 - RNA, 22 nt, synthetic construct
  source 1..22: mol_type = other RNA
tggggtggcctgtatcatagag

SEQ ID NO: 4104 - RNA, 22 nt, synthetic construct
  source 1..22: mol_type = other RNA
tgtaccttccagatacagacct

SEQ ID NO: 4105 - RNA, 22 nt, synthetic construct
  source 1..22: mol_type = other RNA
tgtatcatagagagaggaaaaa

SEQ ID NO: 4106 - RNA, 22 nt, synthetic construct
  source 1..22: mol_type = other RNA
tgtatctggaaggtacaggtga

SEQ ID NO: 4107 - RNA, 22 nt, synthetic construct
  source 1..22: mol_type = other RNA
tgttaaatgggccactttcctc

SEQ ID NO: 4108 - RNA, 22 nt, synthetic construct
  source 1..22: mol_type = other RNA
ttaaatgggccactttcctcag

SEQ ID NO: 4109 - RNA, 22 nt, synthetic construct
  source 1..22: mol_type = other RNA
ttaacaggtctgtatctggaag

SEQ ID NO: 4110 - RNA, 22 nt, synthetic construct
  source 1..22: mol_type = other RNA
ttcagggggtggactggggtgg

SEQ ID NO: 4111 - RNA, 22 nt, synthetic construct
  source 1..22: mol_type = other RNA
ttccagatacagacctgttaaa

SEQ ID NO: 4112 - RNA, 22 nt, synthetic construct
  source 1..22: mol_type = other RNA
ttcccaaatctcacctgtacct

SEQ ID NO: 4113 - RNA, 22 nt, synthetic construct
  source 1..22: mol_type = other RNA
ttcctctctctatgatacaggc

SEQ ID NO: 4114 - RNA, 22 nt, synthetic construct
  source 1..22: mol_type = other RNA
tttaacaggtctgtatctggaa

SEQ ID NO: 4115 - RNA, 22 nt, synthetic construct
  source 1..22: mol_type = other RNA
tttcagggggtggactggggtg

SEQ ID NO: 4116 - RNA, 22 nt, synthetic construct
  source 1..22: mol_type = other RNA
tttcccaaatctcacctgtacc

SEQ ID NO: 4117 - RNA, 22 nt, synthetic construct
  source 1..22: mol_type = other RNA
tttcctctctctatgatacagg

SEQ ID NO: 4118 - RNA, 22 nt, synthetic construct
  source 1..22: mol_type = other RNA
ttttcagggggtggactggggt

SEQ ID NO: 4119 - RNA, 22 nt, synthetic construct
  source 1..22: mol_type = other RNA
ttttcctctctctatgatacag

SEQ ID NO: 4120 - RNA, 22 nt, synthetic construct
  source 1..22: mol_type = other RNA
tttttcagggggtggactgggg

SEQ ID NO: 4121 - RNA, 22 nt, synthetic construct
  source 1..22: mol_type = other RNA
tttttcctctctctatgataca

SEQ ID NO: 4122 - RNA, 22 nt, synthetic construct
  source 1..22: mol_type = other RNA
ttttttcagggggtggactggg

SEQ ID NO: 4123 - RNA, 20 nt, synthetic construct
  source 1..20: mol_type = other RNA
aaaaacgtctgagattcctc

SEQ ID NO: 4124 - RNA, 20 nt, synthetic construct
  source 1..20: mol_type = other RNA
aaaaagcagctaccaggtgt

SEQ ID NO: 4125 - RNA, 20 nt, synthetic construct
  source 1..20: mol_type = other RNA
aaaaatcattgattgtcagc

SEQ ID NO: 4126 - RNA, 20 nt, synthetic construct
  source 1..20: mol_type = other RNA
aaaaatgcacatctacataa

SEQ ID NO: 4127 - RNA, 20 nt, synthetic construct
  source 1..20: mol_type = other RNA
aaaacatcattagtagctga

SEQ ID NO: 4128 - RNA, 20 nt, synthetic construct
  source 1..20: mol_type = other RNA
aaaacatctctcttgcttat

SEQ ID NO: 4129 - RNA, 20 nt, synthetic construct
  source 1..20: mol_type = other RNA
aaaacgtctgagattcctca

SEQ ID NO: 4130 - RNA, 20 nt, synthetic construct
  source 1..20: mol_type = other RNA
aaaagcagctaccaggtgtt

SEQ ID NO: 4131 - RNA, 20 nt, synthetic construct
  source 1..20: mol_type = other RNA
aaaaggaagactagaggctt

SEQ ID NO: 4132 - RNA, 20 nt, synthetic construct
  source 1..20: mol_type = other RNA
aaaaggacaccttttaactc

SEQ ID NO: 4133 - RNA, 20 nt, synthetic construct
  source 1..20: mol_type = other RNA
aaaaggagctttcaacaagg

SEQ ID NO: 4134 - RNA, 20 nt, synthetic construct
  source 1..20: mol_type = other RNA
aaaaggtgtccttttcaatc

SEQ ID NO: 4135 - RNA, 20 nt, synthetic construct
  source 1..20: mol_type = other RNA
aaaagtatatgttaggatac

SEQ ID NO: 4136 - RNA, 20 nt, synthetic construct
  source 1..20: mol_type = other RNA
aaaatatgggttgcatttgg

SEQ ID NO: 4137 - RNA, 20 nt, synthetic construct
  source 1..20: mol_type = other RNA
aaaatcattgattgtcagct

SEQ ID NO: 4138 - RNA, 20 nt, synthetic construct
  source 1..20: mol_type = other RNA
aaaatcttgaccaaatgcaa

SEQ ID NO: 4139 - RNA, 20 nt, synthetic construct
  source 1..20: mol_type = other RNA
aaaatgcacatctacataaa

SEQ ID NO: 4140 - RNA, 20 nt, synthetic construct
  source 1..20: mol_type = other RNA
aaaatgtctgtagctcctca

SEQ ID NO: 4141 - RNA, 20 nt, synthetic construct
  source 1..20: mol_type = other RNA
aaaattgaccagagagagct

SEQ ID NO: 4142 - RNA, 20 nt, synthetic construct
  source 1..20: mol_type = other RNA
aaacatcattagtagctgac

SEQ ID NO: 4143 - RNA, 20 nt, synthetic construct
  source 1..20: mol_type = other RNA
aaacatctctcttgcttatc

SEQ ID NO: 4144 - RNA, 20 nt, synthetic construct
  source 1..20: mol_type = other RNA
aaacattaggtgagttgagg

SEQ ID NO: 4145 - RNA, 20 nt, synthetic construct
  source 1..20: mol_type = other RNA
aaacgtctgagattcctcaa

SEQ ID NO: 4146 - RNA, 20 nt, synthetic construct
  source 1..20: mol_type = other RNA
aaactaacagataagcaaga

SEQ ID NO: 4147 - RNA, 20 nt, synthetic construct
  source 1..20: mol_type = other RNA
aaactgggctgtactttgta

SEQ ID NO: 4148 - RNA, 20 nt, synthetic construct
  source 1..20: mol_type = other RNA
aaagaatcataatggaaaga

SEQ ID NO: 4149 - RNA, 20 nt, synthetic construct
  source 1..20: mol_type = other RNA
aaagaatcccaaagtgcttc

SEQ ID NO: 4150 - RNA, 20 nt, synthetic construct
  source 1..20: mol_type = other RNA
aaagacagtcccccttgagg

SEQ ID NO: 4151 - RNA, 20 nt, synthetic construct
  source 1..20: mol_type = other RNA
aaagagagaatgtagatatt

SEQ ID NO: 4152 - RNA, 20 nt, synthetic construct
  source 1..20: mol_type = other RNA
aaagaggccaatgccccact

SEQ ID NO: 4153 - RNA, 20 nt, synthetic construct
  source 1..20: mol_type = other RNA
aaagaggctgaaagaggcca

SEQ ID NO: 4154 - RNA, 20 nt, synthetic construct
  source 1..20: mol_type = other RNA
aaagcagctaccaggtgttc

SEQ ID NO: 4155 - RNA, 20 nt, synthetic construct
  source 1..20: mol_type = other RNA
aaagcaggacaattccatag

SEQ ID NO: 4156 - RNA, 20 nt, synthetic construct
  source 1..20: mol_type = other RNA
aaagctccttttggatttat

SEQ ID NO: 4157 - RNA, 20 nt, synthetic construct
  source 1..20: mol_type = other RNA
aaaggaagactagaggcttg

SEQ ID NO: 4158 - RNA, 20 nt, synthetic construct
  source 1..20: mol_type = other RNA
aaaggacaccttttaactca

SEQ ID NO: 4159 - RNA, 20 nt, synthetic construct
  source 1..20: mol_type = other RNA
aaaggagctttcaacaagga

SEQ ID NO: 4160 - RNA, 20 nt, synthetic construct
  source 1..20: mol_type = other RNA
aaaggtgtccttttcaatct

SEQ ID NO: 4161 - RNA, 20 nt, synthetic construct
  source 1..20: mol_type = other RNA
aaagtacagcccagtttcat

SEQ ID NO: 4162 - RNA, 20 nt, synthetic construct
  source 1..20: mol_type = other RNA
aaagtatacttccggggtca

SEQ ID NO: 4163 - RNA, 20 nt, synthetic construct
  source 1..20: mol_type = other RNA
aaagtatatgttaggataca

SEQ ID NO: 4164 - RNA, 20 nt, synthetic construct
  source 1..20: mol_type = other RNA
aaagtgcttctcttagagct

SEQ ID NO: 4165 - RNA, 20 nt, synthetic construct
  source 1..20: mol_type = other RNA
aaataaatccaaaaggagct

SEQ ID NO: 4166 - RNA, 20 nt, synthetic construct
  source 1..20: mol_type = other RNA
aaatacacatgctgtgttag

SEQ ID NO: 4167 - RNA, 20 nt, synthetic construct
  source 1..20: mol_type = other RNA
aaatactctcaggcactaag

SEQ ID NO: 4168 - RNA, 20 nt, synthetic construct
  source 1..20: mol_type = other RNA
aaatatgggttgcatttggt

SEQ ID NO: 4169 - RNA, 20 nt, synthetic construct
  source 1..20: mol_type = other RNA
aaatatttatgtagatgtgc

SEQ ID NO: 4170 - RNA, 20 nt, synthetic construct
  source 1..20: mol_type = other RNA
aaatcattgattgtcagcta

SEQ ID NO: 4171 - RNA, 20 nt, synthetic construct
  source 1..20: mol_type = other RNA
aaatccaaaaggagctttca

SEQ ID NO: 4172 - RNA, 20 nt, synthetic construct
  source 1..20: mol_type = other RNA
aaatcctcaggtcacaacca

SEQ ID NO: 4173 - RNA, 20 nt, synthetic construct
  source 1..20: mol_type = other RNA
aaatcttgaccaaatgcaac

SEQ ID NO: 4174 - RNA, 20 nt, synthetic construct
  source 1..20: mol_type = other RNA
aaatgagtccccaaaacatc

SEQ ID NO: 4175 - RNA, 20 nt, synthetic construct
  source 1..20: mol_type = other RNA
aaatgatcagcactggtaag

SEQ ID NO: 4176 - RNA, 20 nt, synthetic construct
  source 1..20: mol_type = other RNA
aaatgcaacccatattttcc

SEQ ID NO: 4177 - RNA, 20 nt, synthetic construct
  source 1..20: mol_type = other RNA
aaatgcacatctacataaat

SEQ ID NO: 4178 - RNA, 20 nt, synthetic construct
  source 1..20: mol_type = other RNA
aaatgcatatcctgagccat

SEQ ID NO: 4179 - RNA, 20 nt, synthetic construct
  source 1..20: mol_type = other RNA
aaatgcatgtaagaagaccc

SEQ ID NO: 4180 - RNA, 20 nt, synthetic construct
  source 1..20: mol_type = other RNA
aaatggaggaatatgacgga

SEQ ID NO: 4181 - RNA, 20 nt, synthetic construct
  source 1..20: mol_type = other RNA
aaatgtctgtagctcctcaa

SEQ ID NO: 4182 - RNA, 20 nt, synthetic construct
  source 1..20: mol_type = other RNA
aaattgaccagagagagctc

SEQ ID NO: 4183 - RNA, 20 nt, synthetic construct
  source 1..20: mol_type = other RNA
aacaaagaatcataatggaa

SEQ ID NO: 4184 - RNA, 20 nt, synthetic construct
  source 1..20: mol_type = other RNA
aacaacctgcccctgagcca

SEQ ID NO: 4185 - RNA, 20 nt, synthetic construct
  source 1..20: mol_type = other RNA
aacacagcatgtgtatttcc

SEQ ID NO: 4186 - RNA, 20 nt, synthetic construct
  source 1..20: mol_type = other RNA
aacacctggtagctgctttt

SEQ ID NO: 4187 - RNA, 20 nt, synthetic construct
  source 1..20: mol_type = other RNA
aacactgcccccaggtagct

SEQ ID NO: 4188 - RNA, 20 nt, synthetic construct
  source 1..20: mol_type = other RNA
aacagataagcaagagagat

SEQ ID NO: 4189 - RNA, 20 nt, synthetic construct
  source 1..20: mol_type = other RNA
aacatagaactctgggctgc

SEQ ID NO: 4190 - RNA, 20 nt, synthetic construct
  source 1..20: mol_type = other RNA
aacatcattagtagctgaca

SEQ ID NO: 4191 - RNA, 20 nt, synthetic construct
  source 1..20: mol_type = other RNA
aacatctctcttgcttatct

SEQ ID NO: 4192 - RNA, 20 nt, synthetic construct
  source 1..20: mol_type = other RNA
aacattaggtgagttgagga

SEQ ID NO: 4193 - RNA, 20 nt, synthetic construct
  source 1..20: mol_type = other RNA
aacattctcggtgcctgtaa

SEQ ID NO: 4194 - RNA, 20 nt, synthetic construct
  source 1..20: mol_type = other RNA
aaccaagtggaccttgagac

SEQ ID NO: 4195 - RNA, 20 nt, synthetic construct
  source 1..20: mol_type = other RNA
aaccatgtatctgaaagaca

SEQ ID NO: 4196 - RNA, 20 nt, synthetic construct
  source 1..20: mol_type = other RNA
aacccatattttcctaatat

SEQ ID NO: 4197 - RNA, 20 nt, synthetic construct
  source 1..20: mol_type = other RNA
aaccctgtggtctcaaggtc

SEQ ID NO: 4198 - RNA, 20 nt, synthetic construct
  source 1..20: mol_type = other RNA
aacctgcccctgagccacaa

SEQ ID NO: 4199 - RNA, 20 nt, synthetic construct
  source 1..20: mol_type = other RNA
aacgtatctgagctctctct

SEQ ID NO: 4200 - RNA, 20 nt, synthetic construct
  source 1..20: mol_type = other RNA
aacgtctgagattcctcaaa

SEQ ID NO: 4201 - RNA, 20 nt, synthetic construct
  source 1..20: mol_type = other RNA
aactaacagataagcaagag

SEQ ID NO: 4202 - RNA, 20 nt, synthetic construct
  source 1..20: mol_type = other RNA
aactcaaggtccatgcctct

SEQ ID NO: 4203 - RNA, 20 nt, synthetic construct
  source 1..20: mol_type = other RNA
aactcacctaatgtttatga

SEQ ID NO: 4204 - RNA, 20 nt, synthetic construct
  source 1..20: mol_type = other RNA
aactcacctctcaaggtggg

SEQ ID NO: 4205 - RNA, 20 nt, synthetic construct
  source 1..20: mol_type = other RNA
aactctaagtatccccagga

SEQ ID NO: 4206 - RNA, 20 nt, synthetic construct
  source 1..20: mol_type = other RNA
aactctaatagtgcttaaaa

SEQ ID NO: 4207 - RNA, 20 nt, synthetic construct
  source 1..20: mol_type = other RNA
aactctgggctgccatgtga

SEQ ID NO: 4208 - RNA, 20 nt, synthetic construct
  source 1..20: mol_type = other RNA
aactgggctgtactttgtat

SEQ ID NO: 4209 - RNA, 20 nt, synthetic construct
  source 1..20: mol_type = other RNA
aagaacatagaactctgggc

SEQ ID NO: 4210 - RNA, 20 nt, synthetic construct
  source 1..20: mol_type = other RNA
aagaagacatgaaccaagtg

SEQ ID NO: 4211 - RNA, 20 nt, synthetic construct
  source 1..20: mol_type = other RNA
aagaagaccctcactgaata

SEQ ID NO: 4212 - RNA, 20 nt, synthetic construct
  source 1..20: mol_type = other RNA
aagaagggtggccttgtgat

SEQ ID NO: 4213 - RNA, 20 nt, synthetic construct
  source 1..20: mol_type = other RNA
aagaatcataatggaaagaa

SEQ ID NO: 4214 - RNA, 20 nt, synthetic construct
  source 1..20: mol_type = other RNA
aagaatcccaaagtgcttct

SEQ ID NO: 4215 - RNA, 20 nt, synthetic construct
  source 1..20: mol_type = other RNA
aagacacctatggaattgtc

SEQ ID NO: 4216 - RNA, 20 nt, synthetic construct
  source 1..20: mol_type = other RNA
aagacagtcccccttgaggt

SEQ ID NO: 4217 - RNA, 20 nt, synthetic construct
  source 1..20: mol_type = other RNA
aagacatgaaccaagtggac

SEQ ID NO: 4218 - RNA, 20 nt, synthetic construct
  source 1..20: mol_type = other RNA
aagaccctcactgaatacaa

SEQ ID NO: 4219 - RNA, 20 nt, synthetic construct
  source 1..20: mol_type = other RNA
aagactagaggcttgcataa

SEQ ID NO: 4220 - RNA, 20 nt, synthetic construct
  source 1..20: mol_type = other RNA
aagagaagcactttgggatt

SEQ ID NO: 4221 - RNA, 20 nt, synthetic construct
  source 1..20: mol_type = other RNA
aagagagaatgtagatattg

SEQ ID NO: 4222 - RNA, 20 nt, synthetic construct
  source 1..20: mol_type = other RNA
aagagagatgttttggggac

SEQ ID NO: 4223 - RNA, 20 nt, synthetic construct
  source 1..20: mol_type = other RNA
aagaggccaatgccccactg

SEQ ID NO: 4224 - RNA, 20 nt, synthetic construct
  source 1..20: mol_type = other RNA
aagaggctgaaagaggccaa

SEQ ID NO: 4225 - RNA, 20 nt, synthetic construct
  source 1..20: mol_type = other RNA
aagagggagaagcatgaaaa

SEQ ID NO: 4226 - RNA, 20 nt, synthetic construct
  source 1..20: mol_type = other RNA
aagatgagtgtagaacacct

SEQ ID NO: 4227 - RNA, 20 nt, synthetic construct
  source 1..20: mol_type = other RNA
aagatgatgagctactgcac

SEQ ID NO: 4228 - RNA, 20 nt, synthetic construct
  source 1..20: mol_type = other RNA
aagatgctgccagtggggca

SEQ ID NO: 4229 - RNA, 20 nt, synthetic construct
  source 1..20: mol_type = other RNA
aagattgaacactgccccca

SEQ ID NO: 4230 - RNA, 20 nt, synthetic construct
  source 1..20: mol_type = other RNA
aagattgaccccggaagtat

SEQ ID NO: 4231 - RNA, 20 nt, synthetic construct
  source 1..20: mol_type = other RNA
aagattttgaatgcttcctg

SEQ ID NO: 4232 - RNA, 20 nt, synthetic construct
  source 1..20: mol_type = other RNA
aagcaagagagatgttttgg

SEQ ID NO: 4233 - RNA, 20 nt, synthetic construct
  source 1..20: mol_type = other RNA
aagcactattagagttgatt

SEQ ID NO: 4234 - RNA, 20 nt, synthetic construct
  source 1..20: mol_type = other RNA
aagcactttgggattctttc

SEQ ID NO: 4235 - RNA, 20 nt, synthetic construct
  source 1..20: mol_type = other RNA
aagcagctaccaggtgttct

SEQ ID NO: 4236 - RNA, 20 nt, synthetic construct
  source 1..20: mol_type = other RNA
aagcaggacaattccatagg

SEQ ID NO: 4237 - RNA, 20 nt, synthetic construct
  source 1..20: mol_type = other RNA
aagcatgaaaaagcagctac

SEQ ID NO: 4238 - RNA, 20 nt, synthetic construct
  source 1..20: mol_type = other RNA
aagcattcaaaatcttgacc

SEQ ID NO: 4239 - RNA, 20 nt, synthetic construct
  source 1..20: mol_type = other RNA
aagccgaaaaacgtctgaga

SEQ ID NO: 4240 - RNA, 20 nt, synthetic construct
  source 1..20: mol_type = other RNA
aagcctctagtcttcctttt

SEQ ID NO: 4241 - RNA, 20 nt, synthetic construct
  source 1..20: mol_type = other RNA
aagctaaagaggctgaaaga

SEQ ID NO: 4242 - RNA, 20 nt, synthetic construct
  source 1..20: mol_type = other RNA
aagctccttttggatttatt

SEQ ID NO: 4243 - RNA, 20 nt, synthetic construct
  source 1..20: mol_type = other RNA
aagctctaagagaagcactt

SEQ ID NO: 4244 - RNA, 20 nt, synthetic construct
  source 1..20: mol_type = other RNA
aaggaagactagaggcttgc

SEQ ID NO: 4245 - RNA, 20 nt, synthetic construct
  source 1..20: mol_type = other RNA
aaggacaccttttaactcac

SEQ ID NO: 4246 - RNA, 20 nt, synthetic construct
  source 1..20: mol_type = other RNA
aaggagctttcaacaaggaa

SEQ ID NO: 4247 - RNA, 20 nt, synthetic construct
  source 1..20: mol_type = other RNA
aaggccacccttcttatact

SEQ ID NO: 4248 - RNA, 20 nt, synthetic construct
  source 1..20: mol_type = other RNA
aaggcccaccttgagaggtg

SEQ ID NO: 4249 - RNA, 20 nt, synthetic construct
  source 1..20: mol_type = other RNA
aagggatggaaaaggaagac

SEQ ID NO: 4250 - RNA, 20 nt, synthetic construct
  source 1..20: mol_type = other RNA
aagggggactgtctttcaga

SEQ ID NO: 4251 - RNA, 20 nt, synthetic construct
  source 1..20: mol_type = other RNA
aagggtggccttgtgatcaa

SEQ ID NO: 4252 - RNA, 20 nt, synthetic construct
  source 1..20: mol_type = other RNA
aaggtccacttggttcatgt

SEQ ID NO: 4253 - RNA, 20 nt, synthetic construct
  source 1..20: mol_type = other RNA
aaggtccatgcctctggaat

SEQ ID NO: 4254 - RNA, 20 nt, synthetic construct
  source 1..20: mol_type = other RNA
aaggtctacatgaggaactc

SEQ ID NO: 4255 - RNA, 20 nt, synthetic construct
  source 1..20: mol_type = other RNA
aaggtgggccttgctacctc

SEQ ID NO: 4256 - RNA, 20 nt, synthetic construct
  source 1..20: mol_type = other RNA
aaggtgtccttttcaatctg

SEQ ID NO: 4257 - RNA, 20 nt, synthetic construct
  source 1..20: mol_type = other RNA
aagtaagaagacatgaacca

SEQ ID NO: 4258 - RNA, 20 nt, synthetic construct
  source 1..20: mol_type = other RNA
aagtacagcccagtttcatt

SEQ ID NO: 4259 - RNA, 20 nt, synthetic construct
  source 1..20: mol_type = other RNA
aagtataagaagggtggcct

SEQ ID NO: 4260 - RNA, 20 nt, synthetic construct
  source 1..20: mol_type = other RNA
aagtatacttccggggtcaa

SEQ ID NO: 4261 - RNA, 20 nt, synthetic construct
  source 1..20: mol_type = other RNA
aagtatactttggaatatac

SEQ ID NO: 4262 - RNA, 20 nt, synthetic construct
  source 1..20: mol_type = other RNA
aagtatatgttaggatacaa

SEQ ID NO: 4263 - RNA, 20 nt, synthetic construct
  source 1..20: mol_type = other RNA
aagtatccccaggatctggt

SEQ ID NO: 4264 - RNA, 20 nt, synthetic construct
  source 1..20: mol_type = other RNA
aagtccaactcaaggtccat

SEQ ID NO: 4265 - RNA, 20 nt, synthetic construct
  source 1..20: mol_type = other RNA
aagtgaagatgctgccagtg

SEQ ID NO: 4266 - RNA, 20 nt, synthetic construct
  source 1..20: mol_type = other RNA
aagtgcttctcttagagctt

SEQ ID NO: 4267 - RNA, 20 nt, synthetic construct
  source 1..20: mol_type = other RNA
aagtggaccttgagaccaca

SEQ ID NO: 4268 - RNA, 20 nt, synthetic construct
  source 1..20: mol_type = other RNA
aataaatccaaaaggagctt

SEQ ID NO: 4269 - RNA, 20 nt, synthetic construct
  source 1..20: mol_type = other RNA
aataagctaaagaggctgaa

SEQ ID NO: 4270 - RNA, 20 nt, synthetic construct
  source 1..20: mol_type = other RNA
aatacaacattctcggtgcc

SEQ ID NO: 4271 - RNA, 20 nt, synthetic construct
  source 1..20: mol_type = other RNA
aatacacatgctgtgttagg

SEQ ID NO: 4272 - RNA, 20 nt, synthetic construct
  source 1..20: mol_type = other RNA
aatactctcaggcactaaga

SEQ ID NO: 4273 - RNA, 20 nt, synthetic construct
  source 1..20: mol_type = other RNA
aatatacaaagtacagccca

SEQ ID NO: 4274 - RNA, 20 nt, synthetic construct
  source 1..20: mol_type = other RNA
aatatctacattctctcttt

SEQ ID NO: 4275 - RNA, 20 nt, synthetic construct
  source 1..20: mol_type = other RNA
aatatgacggaagaacatag

SEQ ID NO: 4276 - RNA, 20 nt, synthetic construct
  source 1..20: mol_type = other RNA
aatatgggttgcatttggtc

SEQ ID NO: 4277 - RNA, 20 nt, synthetic construct
  source 1..20: mol_type = other RNA
aatatgtacttcacaatatc

SEQ ID NO: 4278 - RNA, 20 nt, synthetic construct
  source 1..20: mol_type = other RNA
aatatttatgtagatgtgca

SEQ ID NO: 4279 - RNA, 20 nt, synthetic construct
  source 1..20: mol_type = other RNA
aatcaactctaatagtgctt

SEQ ID NO: 4280 - RNA, 20 nt, synthetic construct
  source 1..20: mol_type = other RNA
aatcaatgatttttaagcac

SEQ ID NO: 4281 - RNA, 20 nt, synthetic construct
  source 1..20: mol_type = other RNA
aatcataatggaaagaatcc

SEQ ID NO: 4282 - RNA, 20 nt, synthetic construct
  source 1..20: mol_type = other RNA
aatcattgattgtcagctac

SEQ ID NO: 4283 - RNA, 20 nt, synthetic construct
  source 1..20: mol_type = other RNA
aatccaaaaggagctttcaa

SEQ ID NO: 4284 - RNA, 20 nt, synthetic construct
  source 1..20: mol_type = other RNA
aatcccaaagtgcttctctt

SEQ ID NO: 4285 - RNA, 20 nt, synthetic construct
  source 1..20: mol_type = other RNA
aatcctcaggtcacaaccat

SEQ ID NO: 4286 - RNA, 20 nt, synthetic construct
  source 1..20: mol_type = other RNA
aatctcagacgtttttcggc

SEQ ID NO: 4287 - RNA, 20 nt, synthetic construct
  source 1..20: mol_type = other RNA
aatctgcctaaatactctca

SEQ ID NO: 4288 - RNA, 20 nt, synthetic construct
  source 1..20: mol_type = other RNA
aatcttaccagtgctgatca

SEQ ID NO: 4289 - RNA, 20 nt, synthetic construct
  source 1..20: mol_type = other RNA
aatcttgaccaaatgcaacc

SEQ ID NO: 4290 - RNA, 20 nt, synthetic construct
  source 1..20: mol_type = other RNA
aatcttgcaacaacctgccc

SEQ ID NO: 4291 - RNA, 20 nt, synthetic construct
  source 1..20: mol_type = other RNA
aatgaaactgggctgtactt

SEQ ID NO: 4292 - RNA, 20 nt, synthetic construct
  source 1..20: mol_type = other RNA
aatgaaatgagtccccaaaa

SEQ ID NO: 4293 - RNA, 20 nt, synthetic construct
  source 1..20: mol_type = other RNA
aatgagtccccaaaacatct

SEQ ID NO: 4294 - RNA, 20 nt, synthetic construct
  source 1..20: mol_type = other RNA
aatgatcagcactggtaaga

SEQ ID NO: 4295 - RNA, 20 nt, synthetic construct
  source 1..20: mol_type = other RNA
aatgcaacccatattttcct

SEQ ID NO: 4296 - RNA, 20 nt, synthetic construct
  source 1..20: mol_type = other RNA
aatgcacatctacataaata

SEQ ID NO: 4297 - RNA, 20 nt, synthetic construct
  source 1..20: mol_type = other RNA
aatgcatatcctgagccatc

SEQ ID NO: 4298 - RNA, 20 nt, synthetic construct
  source 1..20: mol_type = other RNA
aatgcatgtaagaagaccct

SEQ ID NO: 4299 - RNA, 20 nt, synthetic construct
  source 1..20: mol_type = other RNA
aatgccccactggcagcatc

SEQ ID NO: 4300 - RNA, 20 nt, synthetic construct
  source 1..20: mol_type = other RNA
aatgcttcctgacaatcaac

SEQ ID NO: 4301 - RNA, 20 nt, synthetic construct
  source 1..20: mol_type = other RNA
aatggaaagaatcccaaagt

SEQ ID NO: 4302 - RNA, 20 nt, synthetic construct
  source 1..20: mol_type = other RNA
aatggaggaatatgacggaa

SEQ ID NO: 4303 - RNA, 20 nt, synthetic construct
  source 1..20: mol_type = other RNA
aatgggaagacacctatgga

SEQ ID NO: 4304 - RNA, 20 nt, synthetic construct
  source 1..20: mol_type = other RNA
aatgtagatattgtgaagta

SEQ ID NO: 4305 - RNA, 20 nt, synthetic construct
  source 1..20: mol_type = other RNA
aatgtctgtagctcctcaac

SEQ ID NO: 4306 - RNA, 20 nt, synthetic construct
  source 1..20: mol_type = other RNA
aatgttgtattcagtgaggg

SEQ ID NO: 4307 - RNA, 20 nt, synthetic construct
  source 1..20: mol_type = other RNA
aatgtttatgagccagacaa

SEQ ID NO: 4308 - RNA, 20 nt, synthetic construct
  source 1..20: mol_type = other RNA
aattccataggtgtcttccc

SEQ ID NO: 4309 - RNA, 20 nt, synthetic construct
  source 1..20: mol_type = other RNA
aattgaccagagagagctca

SEQ ID NO: 4310 - RNA, 20 nt, synthetic construct
  source 1..20: mol_type = other RNA
aattgcactggaaatacaca

SEQ ID NO: 4311 - RNA, 20 nt, synthetic construct
  source 1..20: mol_type = other RNA
aattgtaggggtgtgtgtgt

SEQ ID NO: 4312 - RNA, 20 nt, synthetic construct
  source 1..20: mol_type = other RNA
aattgtcctgctttctggag

SEQ ID NO: 4313 - RNA, 20 nt, synthetic construct
  source 1..20: mol_type = other RNA
aattttgaggaatctcagac

SEQ ID NO: 4314 - RNA, 20 nt, synthetic construct
  source 1..20: mol_type = other RNA
acaaaaatgcacatctacat

SEQ ID NO: 4315 - RNA, 20 nt, synthetic construct
  source 1..20: mol_type = other RNA
acaaagaatcataatggaaa

SEQ ID NO: 4316 - RNA, 20 nt, synthetic construct
  source 1..20: mol_type = other RNA
acaaagtacagcccagtttc

SEQ ID NO: 4317 - RNA, 20 nt, synthetic construct
  source 1..20: mol_type = other RNA
acaaatggaggaatatgacg

SEQ ID NO: 4318 - RNA, 20 nt, synthetic construct
  source 1..20: mol_type = other RNA
acaacattctcggtgcctgt

SEQ ID NO: 4319 - RNA, 20 nt, synthetic construct
  source 1..20: mol_type = other RNA
acaaccatgtatctgaaaga

SEQ ID NO: 4320 - RNA, 20 nt, synthetic construct
  source 1..20: mol_type = other RNA
acaacctgcccctgagccac

SEQ ID NO: 4321 - RNA, 20 nt, synthetic construct
  source 1..20: mol_type = other RNA
acaaggccacccttcttata

SEQ ID NO: 4322 - RNA, 20 nt, synthetic construct
  source 1..20: mol_type = other RNA
acaaggtctacatgaggaac

SEQ ID NO: 4323 - RNA, 20 nt, synthetic construct
  source 1..20: mol_type = other RNA
acaatatctacattctctct

SEQ ID NO: 4324 - RNA, 20 nt, synthetic construct
  source 1..20: mol_type = other RNA
acaatcaactctaatagtgc

SEQ ID NO: 4325 - RNA, 20 nt, synthetic construct
  source 1..20: mol_type = other RNA
acaatcaatgatttttaagc

SEQ ID NO: 4326 - RNA, 20 nt, synthetic construct
  source 1..20: mol_type = other RNA
acaattccataggtgtcttc

SEQ ID NO: 4327 - RNA, 20 nt, synthetic construct
  source 1..20: mol_type = other RNA
acaattgcactggaaataca

SEQ ID NO: 4328 - RNA, 20 nt, synthetic construct
  source 1..20: mol_type = other RNA
acacacacacccctacaatt

SEQ ID NO: 4329 - RNA, 20 nt, synthetic construct
  source 1..20: mol_type = other RNA
acacacacccctacaattgc

SEQ ID NO: 4330 - RNA, 20 nt, synthetic construct
  source 1..20: mol_type = other RNA
acacacccctacaattgcac

SEQ ID NO: 4331 - RNA, 20 nt, synthetic construct
  source 1..20: mol_type = other RNA
acacagcatgtgtatttcca

SEQ ID NO: 4332 - RNA, 20 nt, synthetic construct
  source 1..20: mol_type = other RNA
acacatgctgtgttaggaat

SEQ ID NO: 4333 - RNA, 20 nt, synthetic construct
  source 1..20: mol_type = other RNA
acacccctacaattgcactg

SEQ ID NO: 4334 - RNA, 20 nt, synthetic construct
  source 1..20: mol_type = other RNA
acacctatggaattgtcctg

SEQ ID NO: 4335 - RNA, 20 nt, synthetic construct
  source 1..20: mol_type = other RNA
acacctggtagctgcttttt

SEQ ID NO: 4336 - RNA, 20 nt, synthetic construct
  source 1..20: mol_type = other RNA
acaccttttaactcacctct

SEQ ID NO: 4337 - RNA, 20 nt, synthetic construct
  source 1..20: mol_type = other RNA
acactcatcttagtgcctga

SEQ ID NO: 4338 - RNA, 20 nt, synthetic construct
  source 1..20: mol_type = other RNA
acactgcccccaggtagctg

SEQ ID NO: 4339 - RNA, 20 nt, synthetic construct
  source 1..20: mol_type = other RNA
acagacattttgaaccctgt

SEQ ID NO: 4340 - RNA, 20 nt, synthetic construct
  source 1..20: mol_type = other RNA
acagataagcaagagagatg

SEQ ID NO: 4341 - RNA, 20 nt, synthetic construct
  source 1..20: mol_type = other RNA
acagcatgtgtatttccagt

SEQ ID NO: 4342 - RNA, 20 nt, synthetic construct
  source 1..20: mol_type = other RNA
acagcccagtttcattgatc

SEQ ID NO: 4343 - RNA, 20 nt, synthetic construct
  source 1..20: mol_type = other RNA
acaggcaccgagaatgttgt

SEQ ID NO: 4344 - RNA, 20 nt, synthetic construct
  source 1..20: mol_type = other RNA
acagggttcaaaatgtctgt

SEQ ID NO: 4345 - RNA, 20 nt, synthetic construct
  source 1..20: mol_type = other RNA
acagtcccccttgaggtagc

SEQ ID NO: 4346 - RNA, 20 nt, synthetic construct
  source 1..20: mol_type = other RNA
acatagaactctgggctgcc

SEQ ID NO: 4347 - RNA, 20 nt, synthetic construct
  source 1..20: mol_type = other RNA
acatataaatgatcagcact

SEQ ID NO: 4348 - RNA, 20 nt, synthetic construct
  source 1..20: mol_type = other RNA
acatattaggaaaatatggg

SEQ ID NO: 4349 - RNA, 20 nt, synthetic construct
  source 1..20: mol_type = other RNA
acatcattagtagctgacaa

SEQ ID NO: 4350 - RNA, 20 nt, synthetic construct
  source 1..20: mol_type = other RNA
acatctctcttgcttatctg

SEQ ID NO: 4351 - RNA, 20 nt, synthetic construct
  source 1..20: mol_type = other RNA
acatctgcccagtagtgcag

SEQ ID NO: 4352 - RNA, 20 nt, synthetic construct
  source 1..20: mol_type = other RNA
acatgaaccaagtggacctt

SEQ ID NO: 4353 - RNA, 20 nt, synthetic construct
  source 1..20: mol_type = other RNA
acatgaggaactctaagtat

SEQ ID NO: 4354 - RNA, 20 nt, synthetic construct
  source 1..20: mol_type = other RNA
acatgcatttgaggtcaagt

SEQ ID NO: 4355 - RNA, 20 nt, synthetic construct
  source 1..20: mol_type = other RNA
acatgctgtgttaggaatga

SEQ ID NO: 4356 - RNA, 20 nt, synthetic construct
  source 1..20: mol_type = other RNA
acatggcagcccagagttct

SEQ ID NO: 4357 - RNA, 20 nt, synthetic construct
  source 1..20: mol_type = other RNA
acatggttgtgacctgagga

SEQ ID NO: 4358 - RNA, 20 nt, synthetic construct
  source 1..20: mol_type = other RNA
acatgttttcatttcacaaa

SEQ ID NO: 4359 - RNA, 20 nt, synthetic construct
  source 1..20: mol_type = other RNA
acattaggtgagttgaggag

SEQ ID NO: 4360 - RNA, 20 nt, synthetic construct
  source 1..20: mol_type = other RNA
acattctcggtgcctgtaac

SEQ ID NO: 4361 - RNA, 20 nt, synthetic construct
  source 1..20: mol_type = other RNA
acattctctctttagtcata

SEQ ID NO: 4362 - RNA, 20 nt, synthetic construct
  source 1..20: mol_type = other RNA
acattttgaaccctgtggtc

SEQ ID NO: 4363 - RNA, 20 nt, synthetic construct
  source 1..20: mol_type = other RNA
accaaatgcaacccatattt

SEQ ID NO: 4364 - RNA, 20 nt, synthetic construct
  source 1..20: mol_type = other RNA
accaagtggaccttgagacc

SEQ ID NO: 4365 - RNA, 20 nt, synthetic construct
  source 1..20: mol_type = other RNA
accacagggttcaaaatgtc

SEQ ID NO: 4366 - RNA, 20 nt, synthetic construct
  source 1..20: mol_type = other RNA
accagagagagctcagatac

SEQ ID NO: 4367 - RNA, 20 nt, synthetic construct
  source 1..20: mol_type = other RNA
accagatcctggggatactt

SEQ ID NO: 4368 - RNA, 20 nt, synthetic construct
  source 1..20: mol_type = other RNA
accaggtgttctacactcat

SEQ ID NO: 4369 - RNA, 20 nt, synthetic construct
  source 1..20: mol_type = other RNA
accagtgctgatcatttata

SEQ ID NO: 4370 - RNA, 20 nt, synthetic construct
  source 1..20: mol_type = other RNA
accatgtatctgaaagacag

SEQ ID NO: 4371 - RNA, 20 nt, synthetic construct
  source 1..20: mol_type = other RNA
acccatattttcctaatatg

SEQ ID NO: 4372 - RNA, 20 nt, synthetic construct
  source 1..20: mol_type = other RNA
accccggaagtatactttgg

SEQ ID NO: 4373 - RNA, 20 nt, synthetic construct
  source 1..20: mol_type = other RNA
acccctacaattgcactgga

SEQ ID NO: 4374 - RNA, 20 nt, synthetic construct
  source 1..20: mol_type = other RNA
accctcactgaatacaacat

SEQ ID NO: 4375 - RNA, 20 nt, synthetic construct
  source 1..20: mol_type = other RNA
accctgtggtctcaaggtcc

SEQ ID NO: 4376 - RNA, 20 nt, synthetic construct
  source 1..20: mol_type = other RNA
acccttcttatacttcactc

SEQ ID NO: 4377 - RNA, 20 nt, synthetic construct
  source 1..20: mol_type = other RNA
accgagaatgttgtattcag

SEQ ID NO: 4378 - RNA, 20 nt, synthetic construct
  source 1..20: mol_type = other RNA
accgatggctcaggatatgc

SEQ ID NO: 4379 - RNA, 20 nt, synthetic construct
  source 1..20: mol_type = other RNA
acctaatgtttatgagccag

SEQ ID NO: 4380 - RNA, 20 nt, synthetic construct
  source 1..20: mol_type = other RNA
acctatggaattgtcctgct

SEQ ID NO: 4381 - RNA, 20 nt, synthetic construct
  source 1..20: mol_type = other RNA
acctcaaatgcatgtaagaa

SEQ ID NO: 4382 - RNA, 20 nt, synthetic construct
  source 1..20: mol_type = other RNA
acctcaagggggactgtctt

SEQ ID NO: 4383 - RNA, 20 nt, synthetic construct
  source 1..20: mol_type = other RNA
acctctcaaggtgggccttg

SEQ ID NO: 4384 - RNA, 20 nt, synthetic construct
  source 1..20: mol_type = other RNA
acctgaggatttaagggatg

SEQ ID NO: 4385 - RNA, 20 nt, synthetic construct
  source 1..20: mol_type = other RNA
acctgcccctgagccacaag

SEQ ID NO: 4386 - RNA, 20 nt, synthetic construct
  source 1..20: mol_type = other RNA
acctgggggcagtgttcaat

SEQ ID NO: 4387 - RNA, 20 nt, synthetic construct
  source 1..20: mol_type = other RNA
acctggtagctgctttttca

SEQ ID NO: 4388 - RNA, 20 nt, synthetic construct
  source 1..20: mol_type = other RNA
accttgagaccacagggttc

SEQ ID NO: 4389 - RNA, 20 nt, synthetic construct
  source 1..20: mol_type = other RNA
accttgagaggtgagttaaa

SEQ ID NO: 4390 - RNA, 20 nt, synthetic construct
  source 1..20: mol_type = other RNA
accttgagttggacttgcct

SEQ ID NO: 4391 - RNA, 20 nt, synthetic construct
  source 1..20: mol_type = other RNA
accttgtggctcaggggcag

SEQ ID NO: 4392 - RNA, 20 nt, synthetic construct
  source 1..20: mol_type = other RNA
accttttaactcacctctca

SEQ ID NO: 4393 - RNA, 20 nt, synthetic construct
  source 1..20: mol_type = other RNA
acggaagaacatagaactct

SEQ ID NO: 4394 - RNA, 20 nt, synthetic construct
  source 1..20: mol_type = other RNA
acgtatctgagctctctctg

SEQ ID NO: 4395 - RNA, 20 nt, synthetic construct
  source 1..20: mol_type = other RNA
acgtctgagattcctcaaaa

SEQ ID NO: 4396 - RNA, 20 nt, synthetic construct
  source 1..20: mol_type = other RNA
acgttgacatataaatgatc

SEQ ID NO: 4397 - RNA, 20 nt, synthetic construct
  source 1..20: mol_type = other RNA
acgtttttcggcttatataa

SEQ ID NO: 4398 - RNA, 20 nt, synthetic construct
  source 1..20: mol_type = other RNA
actaaagagagaatgtagat

SEQ ID NO: 4399 - RNA, 20 nt, synthetic construct
  source 1..20: mol_type = other RNA
actaacagataagcaagaga

SEQ ID NO: 4400 - RNA, 20 nt, synthetic construct
  source 1..20: mol_type = other RNA
actaagatgagtgtagaaca

SEQ ID NO: 4401 - RNA, 20 nt, synthetic construct
  source 1..20: mol_type = other RNA
actaatgatgttttcctata

SEQ ID NO: 4402 - RNA, 20 nt, synthetic construct
  source 1..20: mol_type = other RNA
actactgggcagatgtgggc

SEQ ID NO: 4403 - RNA, 20 nt, synthetic construct
  source 1..20: mol_type = other RNA
actagaggcttgcataataa

SEQ ID NO: 4404 - RNA, 20 nt, synthetic construct
  source 1..20: mol_type = other RNA
actattagagttgattgtca

SEQ ID NO: 4405 - RNA, 20 nt, synthetic construct
  source 1..20: mol_type = other RNA
actattccttgttgaaagct

SEQ ID NO: 4406 - RNA, 20 nt, synthetic construct
  source 1..20: mol_type = other RNA
actcaaggtccatgcctctg

SEQ ID NO: 4407 - RNA, 20 nt, synthetic construct
  source 1..20: mol_type = other RNA
actcacctaatgtttatgag

SEQ ID NO: 4408 - RNA, 20 nt, synthetic construct
  source 1..20: mol_type = other RNA
actcacctctcaaggtgggc

SEQ ID NO: 4409 - RNA, 20 nt, synthetic construct
  source 1..20: mol_type = other RNA
actcatcttagtgcctgaga

SEQ ID NO: 4410 - RNA, 20 nt, synthetic construct
  source 1..20: mol_type = other RNA
actcatttcattcctaacac

SEQ ID NO: 4411 - RNA, 20 nt, synthetic construct
  source 1..20: mol_type = other RNA
actccagaaagcaggacaat

SEQ ID NO: 4412 - RNA, 20 nt, synthetic construct
  source 1..20: mol_type = other RNA
actctaagtatccccaggat

SEQ ID NO: 4413 - RNA, 20 nt, synthetic construct
  source 1..20: mol_type = other RNA
actctaatagtgcttaaaaa

SEQ ID NO: 4414 - RNA, 20 nt, synthetic construct
  source 1..20: mol_type = other RNA
actctcaggcactaagatga

SEQ ID NO: 4415 - RNA, 20 nt, synthetic construct
  source 1..20: mol_type = other RNA
actctgggctgccatgtgaa

SEQ ID NO: 4416 - RNA, 20 nt, synthetic construct
  source 1..20: mol_type = other RNA
actgaatacaacattctcgg

SEQ ID NO: 4417 - RNA, 20 nt, synthetic construct
  source 1..20: mol_type = other RNA
actgcactactgggcagatg

SEQ ID NO: 4418 - RNA, 20 nt, synthetic construct
  source 1..20: mol_type = other RNA
actgcccccaggtagctgct

SEQ ID NO: 4419 - RNA, 20 nt, synthetic construct
  source 1..20: mol_type = other RNA
actggaaatacacatgctgt

SEQ ID NO: 4420 - RNA, 20 nt, synthetic construct
  source 1..20: mol_type = other RNA
actggcagcatcttcacttc

SEQ ID NO: 4421 - RNA, 20 nt, synthetic construct
  source 1..20: mol_type = other RNA
actgggcagatgtgggcccg

SEQ ID NO: 4422 - RNA, 20 nt, synthetic construct
  source 1..20: mol_type = other RNA
actgggctgtactttgtata

SEQ ID NO: 4423 - RNA, 20 nt, synthetic construct
  source 1..20: mol_type = other RNA
actggtaagattgaacactg

SEQ ID NO: 4424 - RNA, 20 nt, synthetic construct
  source 1..20: mol_type = other RNA
actgtctttcagatacatgg

SEQ ID NO: 4425 - RNA, 20 nt, synthetic construct
  source 1..20: mol_type = other RNA
acttagagttcctcatgtag

SEQ ID NO: 4426 - RNA, 20 nt, synthetic construct
  source 1..20: mol_type = other RNA
acttcacaatatctacattc

SEQ ID NO: 4427 - RNA, 20 nt, synthetic construct
  source 1..20: mol_type = other RNA
acttcactccagaaagcagg

SEQ ID NO: 4428 - RNA, 20 nt, synthetic construct
  source 1..20: mol_type = other RNA
acttccggggtcaatcttgc

SEQ ID NO: 4429 - RNA, 20 nt, synthetic construct
  source 1..20: mol_type = other RNA
acttctaaatgcatatcctg

SEQ ID NO: 4430 - RNA, 20 nt, synthetic construct
  source 1..20: mol_type = other RNA
acttgacctcaaatgcatgt

SEQ ID NO: 4431 - RNA, 20 nt, synthetic construct
  source 1..20: mol_type = other RNA
acttgcctgaaataaatcca

SEQ ID NO: 4432 - RNA, 20 nt, synthetic construct
  source 1..20: mol_type = other RNA
acttggttcatgtcttctta

SEQ ID NO: 4433 - RNA, 20 nt, synthetic construct
  source 1..20: mol_type = other RNA
actttggaatatacaaagta

SEQ ID NO: 4434 - RNA, 20 nt, synthetic construct
  source 1..20: mol_type = other RNA
actttgggattctttccatt

SEQ ID NO: 4435 - RNA, 20 nt, synthetic construct
  source 1..20: mol_type = other RNA
actttgtatattccaaagta

SEQ ID NO: 4436 - RNA, 20 nt, synthetic construct
  source 1..20: mol_type = other RNA
agaaagcaggacaattccat

SEQ ID NO: 4437 - RNA, 20 nt, synthetic construct
  source 1..20: mol_type = other RNA
agaacacctggtagctgctt

SEQ ID NO: 4438 - RNA, 20 nt, synthetic construct
  source 1..20: mol_type = other RNA
agaacatagaactctgggct

SEQ ID NO: 4439 - RNA, 20 nt, synthetic construct
  source 1..20: mol_type = other RNA
agaactctgggctgccatgt

SEQ ID NO: 4440 - RNA, 20 nt, synthetic construct
  source 1..20: mol_type = other RNA
agaagacatgaaccaagtgg

SEQ ID NO: 4441 - RNA, 20 nt, synthetic construct
  source 1..20: mol_type = other RNA
agaagaccctcactgaatac

SEQ ID NO: 4442 - RNA, 20 nt, synthetic construct
  source 1..20: mol_type = other RNA
agaagcactttgggattctt

SEQ ID NO: 4443 - RNA, 20 nt, synthetic construct
  source 1..20: mol_type = other RNA
agaagcatgaaaaagcagct

SEQ ID NO: 4444 - RNA, 20 nt, synthetic construct
  source 1..20: mol_type = other RNA
agaagggtggccttgtgatc

SEQ ID NO: 4445 - RNA, 20 nt, synthetic construct
  source 1..20: mol_type = other RNA
agaagtgaagatgctgccag

SEQ ID NO: 4446 - RNA, 20 nt, synthetic construct
  source 1..20: mol_type = other RNA
agaatcataatggaaagaat

SEQ ID NO: 4447 - RNA, 20 nt, synthetic construct
  source 1..20: mol_type = other RNA
agaatcccaaagtgcttctc

SEQ ID NO: 4448 - RNA, 20 nt, synthetic construct
  source 1..20: mol_type = other RNA
agaatgtagatattgtgaag

SEQ ID NO: 4449 - RNA, 20 nt, synthetic construct
  source 1..20: mol_type = other RNA
agaatgttgtattcagtgag

SEQ ID NO: 4450 - RNA, 20 nt, synthetic construct
  source 1..20: mol_type = other RNA
agacaaatggaggaatatga

SEQ ID NO: 4451 - RNA, 20 nt, synthetic construct
  source 1..20: mol_type = other RNA
agacacctatggaattgtcc

SEQ ID NO: 4452 - RNA, 20 nt, synthetic construct
  source 1..20: mol_type = other RNA
agacagtcccccttgaggta

SEQ ID NO: 4453 - RNA, 20 nt, synthetic construct
  source 1..20: mol_type = other RNA
agacatgaaccaagtggacc

SEQ ID NO: 4454 - RNA, 20 nt, synthetic construct
  source 1..20: mol_type = other RNA
agacattttgaaccctgtgg

SEQ ID NO: 4455 - RNA, 20 nt, synthetic construct
  source 1..20: mol_type = other RNA
agaccacagggttcaaaatg

SEQ ID NO: 4456 - RNA, 20 nt, synthetic construct
  source 1..20: mol_type = other RNA
agaccctcactgaatacaac

SEQ ID NO: 4457 - RNA, 20 nt, synthetic construct
  source 1..20: mol_type = other RNA
agaccttgtggctcaggggc

SEQ ID NO: 4458 - RNA, 20 nt, synthetic construct
  source 1..20: mol_type = other RNA
agacgtttttcggcttatat

SEQ ID NO: 4459 - RNA, 20 nt, synthetic construct
  source 1..20: mol_type = other RNA
agactagaggcttgcataat

SEQ ID NO: 4460 - RNA, 20 nt, synthetic construct
  source 1..20: mol_type = other RNA
agagaagcactttgggattc

SEQ ID NO: 4461 - RNA, 20 nt, synthetic construct
  source 1..20: mol_type = other RNA
agagaatgtagatattgtga

SEQ ID NO: 4462 - RNA, 20 nt, synthetic construct
  source 1..20: mol_type = other RNA
agagagaatgtagatattgt

SEQ ID NO: 4463 - RNA, 20 nt, synthetic construct
  source 1..20: mol_type = other RNA
agagagagctcagatacgtt

SEQ ID NO: 4464 - RNA, 20 nt, synthetic construct
  source 1..20: mol_type = other RNA
agagagatgttttggggact

SEQ ID NO: 4465 - RNA, 20 nt, synthetic construct
  source 1..20: mol_type = other RNA
agagagctcagatacgttga

SEQ ID NO: 4466 - RNA, 20 nt, synthetic construct
  source 1..20: mol_type = other RNA
agagatgttttggggactca

SEQ ID NO: 4467 - RNA, 20 nt, synthetic construct
  source 1..20: mol_type = other RNA
agagctcagatacgttgaca

SEQ ID NO: 4468 - RNA, 20 nt, synthetic construct
  source 1..20: mol_type = other RNA
agagcttatataagccgaaa

SEQ ID NO: 4469 - RNA, 20 nt, synthetic construct
  source 1..20: mol_type = other RNA
agaggcatggaccttgagtt

SEQ ID NO: 4470 - RNA, 20 nt, synthetic construct
  source 1..20: mol_type = other RNA
agaggccaatgccccactgg

SEQ ID NO: 4471 - RNA, 20 nt, synthetic construct
  source 1..20: mol_type = other RNA
agaggctgaaagaggccaat

SEQ ID NO: 4472 - RNA, 20 nt, synthetic construct
  source 1..20: mol_type = other RNA
agaggcttgcataataagct

SEQ ID NO: 4473 - RNA, 20 nt, synthetic construct
  source 1..20: mol_type = other RNA
agagggagaagcatgaaaaa

SEQ ID NO: 4474 - RNA, 20 nt, synthetic construct
  source 1..20: mol_type = other RNA
agaggtgagttaaaaggtgt

SEQ ID NO: 4475 - RNA, 20 nt, synthetic construct
  source 1..20: mol_type = other RNA
agagtatttaggcagattga

SEQ ID NO: 4476 - RNA, 20 nt, synthetic construct
  source 1..20: mol_type = other RNA
agagttcctcatgtagacct

SEQ ID NO: 4477 - RNA, 20 nt, synthetic construct
  source 1..20: mol_type = other RNA
agagttctatgttcttccgt

SEQ ID NO: 4478 - RNA, 20 nt, synthetic construct
  source 1..20: mol_type = other RNA
agagttgattgtcaggaagc

SEQ ID NO: 4479 - RNA, 20 nt, synthetic construct
  source 1..20: mol_type = other RNA
agataagcaagagagatgtt

SEQ ID NO: 4480 - RNA, 20 nt, synthetic construct
  source 1..20: mol_type = other RNA
agatacatggttgtgacctg

SEQ ID NO: 4481 - RNA, 20 nt, synthetic construct
  source 1..20: mol_type = other RNA
agatacgttgacatataaat

SEQ ID NO: 4482 - RNA, 20 nt, synthetic construct
  source 1..20: mol_type = other RNA
agatattgtgaagtacatat

SEQ ID NO: 4483 - RNA, 20 nt, synthetic construct
  source 1..20: mol_type = other RNA
agatcctggggatacttaga

SEQ ID NO: 4484 - RNA, 20 nt, synthetic construct
  source 1..20: mol_type = other RNA
agatgagtgtagaacacctg

SEQ ID NO: 4485 - RNA, 20 nt, synthetic construct
  source 1..20: mol_type = other RNA
agatgatgagctactgcact

SEQ ID NO: 4486 - RNA, 20 nt, synthetic construct
  source 1..20: mol_type = other RNA
agatgctgccagtggggcat

SEQ ID NO: 4487 - RNA, 20 nt, synthetic construct
  source 1..20: mol_type = other RNA
agatgtgcatttttgtgaaa

SEQ ID NO: 4488 - RNA, 20 nt, synthetic construct
  source 1..20: mol_type = other RNA
agatgtgggcccgcagcagc

SEQ ID NO: 4489 - RNA, 20 nt, synthetic construct
  source 1..20: mol_type = other RNA
agatgttttggggactcatt

SEQ ID NO: 4490 - RNA, 20 nt, synthetic construct
  source 1..20: mol_type = other RNA
agattcctcaaaattgacca

SEQ ID NO: 4491 - RNA, 20 nt, synthetic construct
  source 1..20: mol_type = other RNA
agattgaaaaggacaccttt

SEQ ID NO: 4492 - RNA, 20 nt, synthetic construct
  source 1..20: mol_type = other RNA
agattgaacactgcccccag

SEQ ID NO: 4493 - RNA, 20 nt, synthetic construct
  source 1..20: mol_type = other RNA
agattgaccccggaagtata

SEQ ID NO: 4494 - RNA, 20 nt, synthetic construct
  source 1..20: mol_type = other RNA
agattttgaatgcttcctga

SEQ ID NO: 4495 - RNA, 20 nt, synthetic construct
  source 1..20: mol_type = other RNA
agcaagagagatgttttggg

SEQ ID NO: 4496 - RNA, 20 nt, synthetic construct
  source 1..20: mol_type = other RNA
agcaaggcccaccttgagag

SEQ ID NO: 4497 - RNA, 20 nt, synthetic construct
  source 1..20: mol_type = other RNA
agcactattagagttgattg

SEQ ID NO: 4498 - RNA, 20 nt, synthetic construct
  source 1..20: mol_type = other RNA
agcactggtaagattgaaca

SEQ ID NO: 4499 - RNA, 20 nt, synthetic construct
  source 1..20: mol_type = other RNA
agcactttgggattctttcc

SEQ ID NO: 4500 - RNA, 20 nt, synthetic construct
  source 1..20: mol_type = other RNA
agcagctaccaggtgttcta

SEQ ID NO: 4501 - RNA, 20 nt, synthetic construct
  source 1..20: mol_type = other RNA
agcagctacctgggggcagt

SEQ ID NO: 4502 - RNA, 20 nt, synthetic construct
  source 1..20: mol_type = other RNA
agcaggacaattccataggt

SEQ ID NO: 4503 - RNA, 20 nt, synthetic construct
  source 1..20: mol_type = other RNA
agcatcttcacttctaaatg

SEQ ID NO: 4504 - RNA, 20 nt, synthetic construct
  source 1..20: mol_type = other RNA
agcatgaaaaagcagctacc

SEQ ID NO: 4505 - RNA, 20 nt, synthetic construct
  source 1..20: mol_type = other RNA
agcatgtgtatttccagtgc

SEQ ID NO: 4506 - RNA, 20 nt, synthetic construct
  source 1..20: mol_type = other RNA
agcattcaaaatcttgacca

SEQ ID NO: 4507 - RNA, 20 nt, synthetic construct
  source 1..20: mol_type = other RNA
agccacaaggtctacatgag

SEQ ID NO: 4508 - RNA, 20 nt, synthetic construct
  source 1..20: mol_type = other RNA
agccagacaaatggaggaat

SEQ ID NO: 4509 - RNA, 20 nt, synthetic construct
  source 1..20: mol_type = other RNA
agccatcggtgaaactaaca

SEQ ID NO: 4510 - RNA, 20 nt, synthetic construct
  source 1..20: mol_type = other RNA
agcccagagttctatgttct

SEQ ID NO: 4511 - RNA, 20 nt, synthetic construct
  source 1..20: mol_type = other RNA
agcccagtttcattgatcac

SEQ ID NO: 4512 - RNA, 20 nt, synthetic construct
  source 1..20: mol_type = other RNA
agccgaaaaacgtctgagat

SEQ ID NO: 4513 - RNA, 20 nt, synthetic construct
  source 1..20: mol_type = other RNA
agcctctagtcttccttttc

SEQ ID NO: 4514 - RNA, 20 nt, synthetic construct
  source 1..20: mol_type = other RNA
agcctctttagcttattatg

SEQ ID NO: 4515 - RNA, 20 nt, synthetic construct
  source 1..20: mol_type = other RNA
agctaaagaggctgaaagag

SEQ ID NO: 4516 - RNA, 20 nt, synthetic construct
  source 1..20: mol_type = other RNA
agctacagacattttgaacc

SEQ ID NO: 4517 - RNA, 20 nt, synthetic construct
  source 1..20: mol_type = other RNA
agctaccaggtgttctacac

SEQ ID NO: 4518 - RNA, 20 nt, synthetic construct
  source 1..20: mol_type = other RNA
agctacctgggggcagtgtt

SEQ ID NO: 4519 - RNA, 20 nt, synthetic construct
  source 1..20: mol_type = other RNA
agctactaatgatgttttcc

SEQ ID NO: 4520 - RNA, 20 nt, synthetic construct
  source 1..20: mol_type = other RNA
agctactgcactactgggca

SEQ ID NO: 4521 - RNA, 20 nt, synthetic construct
  source 1..20: mol_type = other RNA
agctcagatacgttgacata

SEQ ID NO: 4522 - RNA, 20 nt, synthetic construct
  source 1..20: mol_type = other RNA
agctcatcatcttcccctcc

SEQ ID NO: 4523 - RNA, 20 nt, synthetic construct
  source 1..20: mol_type = other RNA
agctcctcaactcacctaat

SEQ ID NO: 4524 - RNA, 20 nt, synthetic construct
  source 1..20: mol_type = other RNA
agctccttttggatttattt

SEQ ID NO: 4525 - RNA, 20 nt, synthetic construct
  source 1..20: mol_type = other RNA
agctctaagagaagcacttt

SEQ ID NO: 4526 - RNA, 20 nt, synthetic construct
  source 1..20: mol_type = other RNA
agctctctctggtcaatttt

SEQ ID NO: 4527 - RNA, 20 nt, synthetic construct
  source 1..20: mol_type = other RNA
agctgacaatcaatgatttt

SEQ ID NO: 4528 - RNA, 20 nt, synthetic construct
  source 1..20: mol_type = other RNA
agctgctgcgggcccacatc

SEQ ID NO: 4529 - RNA, 20 nt, synthetic construct
  source 1..20: mol_type = other RNA
agctgctttttcatgcttct

SEQ ID NO: 4530 - RNA, 20 nt, synthetic construct
  source 1..20: mol_type = other RNA
agcttatataagccgaaaaa

SEQ ID NO: 4531 - RNA, 20 nt, synthetic construct
  source 1..20: mol_type = other RNA
agcttattatgcaagcctct

SEQ ID NO: 4532 - RNA, 20 nt, synthetic construct
  source 1..20: mol_type = other RNA
aggaaaacatcattagtagc

SEQ ID NO: 4533 - RNA, 20 nt, synthetic construct
  source 1..20: mol_type = other RNA
aggaaaatatgggttgcatt

SEQ ID NO: 4534 - RNA, 20 nt, synthetic construct
  source 1..20: mol_type = other RNA
aggaactctaagtatcccca

SEQ ID NO: 4535 - RNA, 20 nt, synthetic construct
  source 1..20: mol_type = other RNA
aggaagactagaggcttgca

SEQ ID NO: 4536 - RNA, 20 nt, synthetic construct
  source 1..20: mol_type = other RNA
aggaagcattcaaaatcttg

SEQ ID NO: 4537 - RNA, 20 nt, synthetic construct
  source 1..20: mol_type = other RNA
aggaatatgacggaagaaca

SEQ ID NO: 4538 - RNA, 20 nt, synthetic construct
  source 1..20: mol_type = other RNA
aggaatctcagacgtttttc

SEQ ID NO: 4539 - RNA, 20 nt, synthetic construct
  source 1..20: mol_type = other RNA
aggaatgaaatgagtcccca

SEQ ID NO: 4540 - RNA, 20 nt, synthetic construct
  source 1..20: mol_type = other RNA
aggacaattccataggtgtc

SEQ ID NO: 4541 - RNA, 20 nt, synthetic construct
  source 1..20: mol_type = other RNA
aggacaccttttaactcacc

SEQ ID NO: 4542 - RNA, 20 nt, synthetic construct
  source 1..20: mol_type = other RNA
aggagctacagacattttga

SEQ ID NO: 4543 - RNA, 20 nt, synthetic construct
  source 1..20: mol_type = other RNA
aggagctttcaacaaggaat

SEQ ID NO: 4544 - RNA, 20 nt, synthetic construct
  source 1..20: mol_type = other RNA
aggatatgcatttagaagtg

SEQ ID NO: 4545 - RNA, 20 nt, synthetic construct
  source 1..20: mol_type = other RNA
aggatctggtgatgatggag

SEQ ID NO: 4546 - RNA, 20 nt, synthetic construct
  source 1..20: mol_type = other RNA
aggatttaagggatggaaaa

SEQ ID NO: 4547 - RNA, 20 nt, synthetic construct
  source 1..20: mol_type = other RNA
aggcaagtccaactcaaggt

SEQ ID NO: 4548 - RNA, 20 nt, synthetic construct
  source 1..20: mol_type = other RNA
aggcaccgagaatgttgtat

SEQ ID NO: 4549 - RNA, 20 nt, synthetic construct
  source 1..20: mol_type = other RNA
aggcactaagatgagtgtag

SEQ ID NO: 4550 - RNA, 20 nt, synthetic construct
  source 1..20: mol_type = other RNA
aggcagattgaaaaggacac

SEQ ID NO: 4551 - RNA, 20 nt, synthetic construct
  source 1..20: mol_type = other RNA
aggcatggaccttgagttgg

SEQ ID NO: 4552 - RNA, 20 nt, synthetic construct
  source 1..20: mol_type = other RNA
aggccaatgccccactggca

SEQ ID NO: 4553 - RNA, 20 nt, synthetic construct
  source 1..20: mol_type = other RNA
aggccacccttcttatactt

SEQ ID NO: 4554 - RNA, 20 nt, synthetic construct
  source 1..20: mol_type = other RNA
aggcccaccttgagaggtga

SEQ ID NO: 4555 - RNA, 20 nt, synthetic construct
  source 1..20: mol_type = other RNA
aggctgaaagaggccaatgc

SEQ ID NO: 4556 - RNA, 20 nt, synthetic construct
  source 1..20: mol_type = other RNA
aggcttgcataataagctaa

SEQ ID NO: 4557 - RNA, 20 nt, synthetic construct
  source 1..20: mol_type = other RNA
agggagaagcatgaaaaagc

SEQ ID NO: 4558 - RNA, 20 nt, synthetic construct
  source 1..20: mol_type = other RNA
agggatggaaaaggaagact

SEQ ID NO: 4559 - RNA, 20 nt, synthetic construct
  source 1..20: mol_type = other RNA
aggggaagatgatgagctac

SEQ ID NO: 4560 - RNA, 20 nt, synthetic construct
  source 1..20: mol_type = other RNA
aggggcaggttgttgcaaga

SEQ ID NO: 4561 - RNA, 20 nt, synthetic construct
  source 1..20: mol_type = other RNA
agggggactgtctttcagat

SEQ ID NO: 4562 - RNA, 20 nt, synthetic construct
  source 1..20: mol_type = other RNA
agggtcttcttacatgcatt

SEQ ID NO: 4563 - RNA, 20 nt, synthetic construct
  source 1..20: mol_type = other RNA
agggtggccttgtgatcaat

SEQ ID NO: 4564 - RNA, 20 nt, synthetic construct
  source 1..20: mol_type = other RNA
agggttcaaaatgtctgtag

SEQ ID NO: 4565 - RNA, 20 nt, synthetic construct
  source 1..20: mol_type = other RNA
aggtagcaaggcccaccttg

SEQ ID NO: 4566 - RNA, 20 nt, synthetic construct
  source 1..20: mol_type = other RNA
aggtagctgctgcgggccca

SEQ ID NO: 4567 - RNA, 20 nt, synthetic construct
  source 1..20: mol_type = other RNA
aggtcaagtaagaagacatg

SEQ ID NO: 4568 - RNA, 20 nt, synthetic construct
  source 1..20: mol_type = other RNA
aggtcacaaccatgtatctg

SEQ ID NO: 4569 - RNA, 20 nt, synthetic construct
  source 1..20: mol_type = other RNA
aggtccacttggttcatgtc

SEQ ID NO: 4570 - RNA, 20 nt, synthetic construct
  source 1..20: mol_type = other RNA
aggtccatgcctctggaatg

SEQ ID NO: 4571 - RNA, 20 nt, synthetic construct
  source 1..20: mol_type = other RNA
aggtctacatgaggaactct

SEQ ID NO: 4572 - RNA, 20 nt, synthetic construct
  source 1..20: mol_type = other RNA
aggtgagttaaaaggtgtcc

SEQ ID NO: 4573 - RNA, 20 nt, synthetic construct
  source 1..20: mol_type = other RNA
aggtgagttgaggagctaca

SEQ ID NO: 4574 - RNA, 20 nt, synthetic construct
  source 1..20: mol_type = other RNA
aggtgggccttgctacctca

SEQ ID NO: 4575 - RNA, 20 nt, synthetic construct
  source 1..20: mol_type = other RNA
aggtgtccttttcaatctgc

SEQ ID NO: 4576 - RNA, 20 nt, synthetic construct
  source 1..20: mol_type = other RNA
aggtgtcttcccattccaga

SEQ ID NO: 4577 - RNA, 20 nt, synthetic construct
  source 1..20: mol_type = other RNA
aggtgttctacactcatctt

SEQ ID NO: 4578 - RNA, 20 nt, synthetic construct
  source 1..20: mol_type = other RNA
aggttgttgcaagattgacc

SEQ ID NO: 4579 - RNA, 20 nt, synthetic construct
  source 1..20: mol_type = other RNA
agtaagaagacatgaaccaa

SEQ ID NO: 4580 - RNA, 20 nt, synthetic construct
  source 1..20: mol_type = other RNA
agtacagcccagtttcattg

SEQ ID NO: 4581 - RNA, 20 nt, synthetic construct
  source 1..20: mol_type = other RNA
agtagctcatcatcttcccc

SEQ ID NO: 4582 - RNA, 20 nt, synthetic construct
  source 1..20: mol_type = other RNA
agtagctgacaatcaatgat

SEQ ID NO: 4583 - RNA, 20 nt, synthetic construct
  source 1..20: mol_type = other RNA
agtagtgcagtagctcatca

SEQ ID NO: 4584 - RNA, 20 nt, synthetic construct
  source 1..20: mol_type = other RNA
agtataagaagggtggcctt

SEQ ID NO: 4585 - RNA, 20 nt, synthetic construct
  source 1..20: mol_type = other RNA
agtatacttccggggtcaat

SEQ ID NO: 4586 - RNA, 20 nt, synthetic construct
  source 1..20: mol_type = other RNA
agtatactttggaatataca

SEQ ID NO: 4587 - RNA, 20 nt, synthetic construct
  source 1..20: mol_type = other RNA
agtatatgttaggatacaaa

SEQ ID NO: 4588 - RNA, 20 nt, synthetic construct
  source 1..20: mol_type = other RNA
agtatccccaggatctggtg

SEQ ID NO: 4589 - RNA, 20 nt, synthetic construct
  source 1..20: mol_type = other RNA
agtatttaggcagattgaaa

SEQ ID NO: 4590 - RNA, 20 nt, synthetic construct
  source 1..20: mol_type = other RNA
agtccaactcaaggtccatg

SEQ ID NO: 4591 - RNA, 20 nt, synthetic construct
  source 1..20: mol_type = other RNA
agtccccaaaacatctctct

SEQ ID NO: 4592 - RNA, 20 nt, synthetic construct
  source 1..20: mol_type = other RNA
agtcccccttgaggtagcaa

SEQ ID NO: 4593 - RNA, 20 nt, synthetic construct
  source 1..20: mol_type = other RNA
agtcttccttttccatccct

SEQ ID NO: 4594 - RNA, 20 nt, synthetic construct
  source 1..20: mol_type = other RNA
agtgaagatgctgccagtgg

SEQ ID NO: 4595 - RNA, 20 nt, synthetic construct
  source 1..20: mol_type = other RNA
agtgaagtataagaagggtg

SEQ ID NO: 4596 - RNA, 20 nt, synthetic construct
  source 1..20: mol_type = other RNA
agtgagggtcttcttacatg

SEQ ID NO: 4597 - RNA, 20 nt, synthetic construct
  source 1..20: mol_type = other RNA
agtgcaattgtaggggtgtg

SEQ ID NO: 4598 - RNA, 20 nt, synthetic construct
  source 1..20: mol_type = other RNA
agtgcagtagctcatcatct

SEQ ID NO: 4599 - RNA, 20 nt, synthetic construct
  source 1..20: mol_type = other RNA
agtgcctgagagtatttagg

SEQ ID NO: 4600 - RNA, 20 nt, synthetic construct
  source 1..20: mol_type = other RNA
agtgctgatcatttatatgt

SEQ ID NO: 4601 - RNA, 20 nt, synthetic construct
  source 1..20: mol_type = other RNA
agtgcttaaaaatcattgat

SEQ ID NO: 4602 - RNA, 20 nt, synthetic construct
  source 1..20: mol_type = other RNA
agtgcttctcttagagctta

SEQ ID NO: 4603 - RNA, 20 nt, synthetic construct
  source 1..20: mol_type = other RNA
agtggaccttgagaccacag

SEQ ID NO: 4604 - RNA, 20 nt, synthetic construct
  source 1..20: mol_type = other RNA
agtggggcattggcctcttt

SEQ ID NO: 4605 - RNA, 20 nt, synthetic construct
  source 1..20: mol_type = other RNA
agtgtagaacacctggtagc

SEQ ID NO: 4606 - RNA, 20 nt, synthetic construct
  source 1..20: mol_type = other RNA
agtgttcaatcttaccagtg

SEQ ID NO: 4607 - RNA, 20 nt, synthetic construct
  source 1..20: mol_type = other RNA
agttaaaaggtgtccttttc

SEQ ID NO: 4608 - RNA, 20 nt, synthetic construct
  source 1..20: mol_type = other RNA
agttcctcatgtagaccttg

SEQ ID NO: 4609 - RNA, 20 nt, synthetic construct
  source 1..20: mol_type = other RNA
agttctatgttcttccgtca

SEQ ID NO: 4610 - RNA, 20 nt, synthetic construct
  source 1..20: mol_type = other RNA
agttgaggagctacagacat

SEQ ID NO: 4611 - RNA, 20 nt, synthetic construct
  source 1..20: mol_type = other RNA
agttgattgtcaggaagcat

SEQ ID NO: 4612 - RNA, 20 nt, synthetic construct
  source 1..20: mol_type = other RNA
agttggacttgcctgaaata

SEQ ID NO: 4613 - RNA, 20 nt, synthetic construct
  source 1..20: mol_type = other RNA
agtttcaccgatggctcagg

SEQ ID NO: 4614 - RNA, 20 nt, synthetic construct
  source 1..20: mol_type = other RNA
agtttcattgatcacaaggc

SEQ ID NO: 4615 - RNA, 20 nt, synthetic construct
  source 1..20: mol_type = other RNA
ataaacattaggtgagttga

SEQ ID NO: 4616 - RNA, 20 nt, synthetic construct
  source 1..20: mol_type = other RNA
ataaatccaaaaggagcttt

SEQ ID NO: 4617 - RNA, 20 nt, synthetic construct
  source 1..20: mol_type = other RNA
ataaatgatcagcactggta

SEQ ID NO: 4618 - RNA, 20 nt, synthetic construct
  source 1..20: mol_type = other RNA
ataagaagggtggccttgtg

SEQ ID NO: 4619 - RNA, 20 nt, synthetic construct
  source 1..20: mol_type = other RNA
ataagcaagagagatgtttt

SEQ ID NO: 4620 - RNA, 20 nt, synthetic construct
  source 1..20: mol_type = other RNA
ataagccgaaaaacgtctga

SEQ ID NO: 4621 - RNA, 20 nt, synthetic construct
  source 1..20: mol_type = other RNA
ataagctaaagaggctgaaa

SEQ ID NO: 4622 - RNA, 20 nt, synthetic construct
  source 1..20: mol_type = other RNA
ataagctctaagagaagcac

SEQ ID NO: 4623 - RNA, 20 nt, synthetic construct
  source 1..20: mol_type = other RNA
ataataagctaaagaggctg

SEQ ID NO: 4624 - RNA, 20 nt, synthetic construct
  source 1..20: mol_type = other RNA
ataatggaaagaatcccaaa

SEQ ID NO: 4625 - RNA, 20 nt, synthetic construct
  source 1..20: mol_type = other RNA
atacaaagtacagcccagtt

SEQ ID NO: 4626 - RNA, 20 nt, synthetic construct
  source 1..20: mol_type = other RNA
atacaacattctcggtgcct

SEQ ID NO: 4627 - RNA, 20 nt, synthetic construct
  source 1..20: mol_type = other RNA
atacacatgctgtgttagga

SEQ ID NO: 4628 - RNA, 20 nt, synthetic construct
  source 1..20: mol_type = other RNA
atacatggttgtgacctgag

SEQ ID NO: 4629 - RNA, 20 nt, synthetic construct
  source 1..20: mol_type = other RNA
atacgttgacatataaatga

SEQ ID NO: 4630 - RNA, 20 nt, synthetic construct
  source 1..20: mol_type = other RNA
atactctcaggcactaagat

SEQ ID NO: 4631 - RNA, 20 nt, synthetic construct
  source 1..20: mol_type = other RNA
atacttagagttcctcatgt

SEQ ID NO: 4632 - RNA, 20 nt, synthetic construct
  source 1..20: mol_type = other RNA
atacttcactccagaaagca

SEQ ID NO: 4633 - RNA, 20 nt, synthetic construct
  source 1..20: mol_type = other RNA
atacttccggggtcaatctt

SEQ ID NO: 4634 - RNA, 20 nt, synthetic construct
  source 1..20: mol_type = other RNA
atactttggaatatacaaag

SEQ ID NO: 4635 - RNA, 20 nt, synthetic construct
  source 1..20: mol_type = other RNA
atagaactctgggctgccat

SEQ ID NO: 4636 - RNA, 20 nt, synthetic construct
  source 1..20: mol_type = other RNA
ataggaaaacatcattagta

SEQ ID NO: 4637 - RNA, 20 nt, synthetic construct
  source 1..20: mol_type = other RNA
ataggtgtcttcccattcca

SEQ ID NO: 4638 - RNA, 20 nt, synthetic construct
  source 1..20: mol_type = other RNA
atagtgcttaaaaatcattg

SEQ ID NO: 4639 - RNA, 20 nt, synthetic construct
  source 1..20: mol_type = other RNA
atataaatgatcagcactgg

SEQ ID NO: 4640 - RNA, 20 nt, synthetic construct
  source 1..20: mol_type = other RNA
atataagccgaaaaacgtct

SEQ ID NO: 4641 - RNA, 20 nt, synthetic construct
  source 1..20: mol_type = other RNA
atataagctctaagagaagc

SEQ ID NO: 4642 - RNA, 20 nt, synthetic construct
  source 1..20: mol_type = other RNA
atatacaaagtacagcccag

SEQ ID NO: 4643 - RNA, 20 nt, synthetic construct
  source 1..20: mol_type = other RNA
atatcctgagccatcggtga

SEQ ID NO: 4644 - RNA, 20 nt, synthetic construct
  source 1..20: mol_type = other RNA
atatctacattctctcttta

SEQ ID NO: 4645 - RNA, 20 nt, synthetic construct
  source 1..20: mol_type = other RNA
atatgacggaagaacataga

SEQ ID NO: 4646 - RNA, 20 nt, synthetic construct
  source 1..20: mol_type = other RNA
atatgcatttagaagtgaag

SEQ ID NO: 4647 - RNA, 20 nt, synthetic construct
  source 1..20: mol_type = other RNA
atatgggttgcatttggtca

SEQ ID NO: 4648 - RNA, 20 nt, synthetic construct
  source 1..20: mol_type = other RNA
atatgtacttcacaatatct

SEQ ID NO: 4649 - RNA, 20 nt, synthetic construct
  source 1..20: mol_type = other RNA
atatgtcaacgtatctgagc

SEQ ID NO: 4650 - RNA, 20 nt, synthetic construct
  source 1..20: mol_type = other RNA
atattaggaaaatatgggtt

SEQ ID NO: 4651 - RNA, 20 nt, synthetic construct
  source 1..20: mol_type = other RNA
atattccaaagtatacttcc

SEQ ID NO: 4652 - RNA, 20 nt, synthetic construct
  source 1..20: mol_type = other RNA
atattcctccatttgtctgg

SEQ ID NO: 4653 - RNA, 20 nt, synthetic construct
  source 1..20: mol_type = other RNA
atatttatgtagatgtgcat

SEQ ID NO: 4654 - RNA, 20 nt, synthetic construct
  source 1..20: mol_type = other RNA
atcaactctaatagtgctta

SEQ ID NO: 4655 - RNA, 20 nt, synthetic construct
  source 1..20: mol_type = other RNA
atcaatgaaactgggctgta

SEQ ID NO: 4656 - RNA, 20 nt, synthetic construct
  source 1..20: mol_type = other RNA
atcaatgatttttaagcact

SEQ ID NO: 4657 - RNA, 20 nt, synthetic construct
  source 1..20: mol_type = other RNA
atcacaaggccacccttctt

SEQ ID NO: 4658 - RNA, 20 nt, synthetic construct
  source 1..20: mol_type = other RNA
atcaccagatcctggggata

SEQ ID NO: 4659 - RNA, 20 nt, synthetic construct
  source 1..20: mol_type = other RNA
atcagcactggtaagattga

SEQ ID NO: 4660 - RNA, 20 nt, synthetic construct
  source 1..20: mol_type = other RNA
atcataatggaaagaatccc

SEQ ID NO: 4661 - RNA, 20 nt, synthetic construct
  source 1..20: mol_type = other RNA
atcatcaccagatcctgggg

SEQ ID NO: 4662 - RNA, 20 nt, synthetic construct
  source 1..20: mol_type = other RNA
atcatcttcccctccatcat

SEQ ID NO: 4663 - RNA, 20 nt, synthetic construct
  source 1..20: mol_type = other RNA
atcattagtagctgacaatc

SEQ ID NO: 4664 - RNA, 20 nt, synthetic construct
  source 1..20: mol_type = other RNA
atcattgattgtcagctact

SEQ ID NO: 4665 - RNA, 20 nt, synthetic construct
  source 1..20: mol_type = other RNA
atcatttatatgtcaacgta

SEQ ID NO: 4666 - RNA, 20 nt, synthetic construct
  source 1..20: mol_type = other RNA
atccaaaaggagctttcaac

SEQ ID NO: 4667 - RNA, 20 nt, synthetic construct
  source 1..20: mol_type = other RNA
atcccaaagtgcttctctta

SEQ ID NO: 4668 - RNA, 20 nt, synthetic construct
  source 1..20: mol_type = other RNA
atccccaggatctggtgatg

SEQ ID NO: 4669 - RNA, 20 nt, synthetic construct
  source 1..20: mol_type = other RNA
atcccttaaatcctcaggtc

SEQ ID NO: 4670 - RNA, 20 nt, synthetic construct
  source 1..20: mol_type = other RNA
atcctcaggtcacaaccatg

SEQ ID NO: 4671 - RNA, 20 nt, synthetic construct
  source 1..20: mol_type = other RNA
atcctgagccatcggtgaaa

SEQ ID NO: 4672 - RNA, 20 nt, synthetic construct
  source 1..20: mol_type = other RNA
atcctggggatacttagagt

SEQ ID NO: 4673 - RNA, 20 nt, synthetic construct
  source 1..20: mol_type = other RNA
atcggtgaaactaacagata

SEQ ID NO: 4674 - RNA, 20 nt, synthetic construct
  source 1..20: mol_type = other RNA
atctacattctctctttagt

SEQ ID NO: 4675 - RNA, 20 nt, synthetic construct
  source 1..20: mol_type = other RNA
atctcagacgtttttcggct

SEQ ID NO: 4676 - RNA, 20 nt, synthetic construct
  source 1..20: mol_type = other RNA
atctctcttgcttatctgtt

SEQ ID NO: 4677 - RNA, 20 nt, synthetic construct
  source 1..20: mol_type = other RNA
atctgaaagacagtccccct

SEQ ID NO: 4678 - RNA, 20 nt, synthetic construct
  source 1..20: mol_type = other RNA
atctgagctctctctggtca

SEQ ID NO: 4679 - RNA, 20 nt, synthetic construct
  source 1..20: mol_type = other RNA
atctgcccagtagtgcagta

SEQ ID NO: 4680 - RNA, 20 nt, synthetic construct
  source 1..20: mol_type = other RNA
atctgcctaaatactctcag

SEQ ID NO: 4681 - RNA, 20 nt, synthetic construct
  source 1..20: mol_type = other RNA
atctggtgatgatggagggg

SEQ ID NO: 4682 - RNA, 20 nt, synthetic construct
  source 1..20: mol_type = other RNA
atctgttagtttcaccgatg

SEQ ID NO: 4683 - RNA, 20 nt, synthetic construct
  source 1..20: mol_type = other RNA
atcttaccagtgctgatcat

SEQ ID NO: 4684 - RNA, 20 nt, synthetic construct
  source 1..20: mol_type = other RNA
atcttagtgcctgagagtat

SEQ ID NO: 4685 - RNA, 20 nt, synthetic construct
  source 1..20: mol_type = other RNA
atcttcacttctaaatgcat

SEQ ID NO: 4686 - RNA, 20 nt, synthetic construct
  source 1..20: mol_type = other RNA
atcttcccctccatcatcac

SEQ ID NO: 4687 - RNA, 20 nt, synthetic construct
  source 1..20: mol_type = other RNA
atcttgaccaaatgcaaccc

SEQ ID NO: 4688 - RNA, 20 nt, synthetic construct
  source 1..20: mol_type = other RNA
atcttgcaacaacctgcccc

SEQ ID NO: 4689 - RNA, 20 nt, synthetic construct
  source 1..20: mol_type = other RNA
atgaaaaagcagctaccagg

SEQ ID NO: 4690 - RNA, 20 nt, synthetic construct
  source 1..20: mol_type = other RNA
atgaaactgggctgtacttt

SEQ ID NO: 4691 - RNA, 20 nt, synthetic construct
  source 1..20: mol_type = other RNA
atgaaatgagtccccaaaac

SEQ ID NO: 4692 - RNA, 20 nt, synthetic construct
  source 1..20: mol_type = other RNA
atgaaccaagtggaccttga

SEQ ID NO: 4693 - RNA, 20 nt, synthetic construct
  source 1..20: mol_type = other RNA
atgacggaagaacatagaac

SEQ ID NO: 4694 - RNA, 20 nt, synthetic construct
  source 1..20: mol_type = other RNA
atgactaaagagagaatgta

SEQ ID NO: 4695 - RNA, 20 nt, synthetic construct
  source 1..20: mol_type = other RNA
atgactattccttgttgaaa

SEQ ID NO: 4696 - RNA, 20 nt, synthetic construct
  source 1..20: mol_type = other RNA
atgagccagacaaatggagg

SEQ ID NO: 4697 - RNA, 20 nt, synthetic construct
  source 1..20: mol_type = other RNA
atgagctactgcactactgg

SEQ ID NO: 4698 - RNA, 20 nt, synthetic construct
  source 1..20: mol_type = other RNA
atgaggaactctaagtatcc

SEQ ID NO: 4699 - RNA, 20 nt, synthetic construct
  source 1..20: mol_type = other RNA
atgagtccccaaaacatctc

SEQ ID NO: 4700 - RNA, 20 nt, synthetic construct
  source 1..20: mol_type = other RNA
atgagtgtagaacacctggt

SEQ ID NO: 4701 - RNA, 20 nt, synthetic construct
  source 1..20: mol_type = other RNA
atgatcagcactggtaagat

SEQ ID NO: 4702 - RNA, 20 nt, synthetic construct
  source 1..20: mol_type = other RNA
atgatgagctactgcactac

SEQ ID NO: 4703 - RNA, 20 nt, synthetic construct
  source 1..20: mol_type = other RNA
atgatggaggggaagatgat

SEQ ID NO: 4704 - RNA, 20 nt, synthetic construct
  source 1..20: mol_type = other RNA
atgattctttgttacaggca

SEQ ID NO: 4705 - RNA, 20 nt, synthetic construct
  source 1..20: mol_type = other RNA
atgcaacccatattttccta

SEQ ID NO: 4706 - RNA, 20 nt, synthetic construct
  source 1..20: mol_type = other RNA
atgcaagcctctagtcttcc

SEQ ID NO: 4707 - RNA, 20 nt, synthetic construct
  source 1..20: mol_type = other RNA
atgcacatctacataaatat

SEQ ID NO: 4708 - RNA, 20 nt, synthetic construct
  source 1..20: mol_type = other RNA
atgcatatcctgagccatcg

SEQ ID NO: 4709 - RNA, 20 nt, synthetic construct
  source 1..20: mol_type = other RNA
atgcatgactattccttgtt

SEQ ID NO: 4710 - RNA, 20 nt, synthetic construct
  source 1..20: mol_type = other RNA
atgcatgtaagaagaccctc

SEQ ID NO: 4711 - RNA, 20 nt, synthetic construct
  source 1..20: mol_type = other RNA
atgcatttagaagtgaagat

SEQ ID NO: 4712 - RNA, 20 nt, synthetic construct
  source 1..20: mol_type = other RNA
atgcatttgaggtcaagtaa

SEQ ID NO: 4713 - RNA, 20 nt, synthetic construct
  source 1..20: mol_type = other RNA
atgccccactggcagcatct

SEQ ID NO: 4714 - RNA, 20 nt, synthetic construct
  source 1..20: mol_type = other RNA
atgcctctggaatgggaaga

SEQ ID NO: 4715 - RNA, 20 nt, synthetic construct
  source 1..20: mol_type = other RNA
atgctgccagtggggcattg

SEQ ID NO: 4716 - RNA, 20 nt, synthetic construct
  source 1..20: mol_type = other RNA
atgctgtgttaggaatgaaa

SEQ ID NO: 4717 - RNA, 20 nt, synthetic construct
  source 1..20: mol_type = other RNA
atgcttcctgacaatcaact

SEQ ID NO: 4718 - RNA, 20 nt, synthetic construct
  source 1..20: mol_type = other RNA
atgcttctccctcttcacat

SEQ ID NO: 4719 - RNA, 20 nt, synthetic construct
  source 1..20: mol_type = other RNA
atggaaaaggaagactagag

SEQ ID NO: 4720 - RNA, 20 nt, synthetic construct
  source 1..20: mol_type = other RNA
atggaaagaatcccaaagtg

SEQ ID NO: 4721 - RNA, 20 nt, synthetic construct
  source 1..20: mol_type = other RNA
atggaattgtcctgctttct

SEQ ID NO: 4722 - RNA, 20 nt, synthetic construct
  source 1..20: mol_type = other RNA
atggaccttgagttggactt

SEQ ID NO: 4723 - RNA, 20 nt, synthetic construct
  source 1..20: mol_type = other RNA
atggaggaatatgacggaag

SEQ ID NO: 4724 - RNA, 20 nt, synthetic construct
  source 1..20: mol_type = other RNA
atggaggggaagatgatgag

SEQ ID NO: 4725 - RNA, 20 nt, synthetic construct
  source 1..20: mol_type = other RNA
atggcagcccagagttctat

SEQ ID NO: 4726 - RNA, 20 nt, synthetic construct
  source 1..20: mol_type = other RNA
atggctcaggatatgcattt

SEQ ID NO: 4727 - RNA, 20 nt, synthetic construct
  source 1..20: mol_type = other RNA
atgggaagacacctatggaa

SEQ ID NO: 4728 - RNA, 20 nt, synthetic construct
  source 1..20: mol_type = other RNA
atgggttgcatttggtcaag

SEQ ID NO: 4729 - RNA, 20 nt, synthetic construct
  source 1..20: mol_type = other RNA
atggttgtgacctgaggatt

SEQ ID NO: 4730 - RNA, 20 nt, synthetic construct
  source 1..20: mol_type = other RNA
atgtaagaagaccctcactg

SEQ ID NO: 4731 - RNA, 20 nt, synthetic construct
  source 1..20: mol_type = other RNA
atgtacttcacaatatctac

SEQ ID NO: 4732 - RNA, 20 nt, synthetic construct
  source 1..20: mol_type = other RNA
atgtagaccttgtggctcag

SEQ ID NO: 4733 - RNA, 20 nt, synthetic construct
  source 1..20: mol_type = other RNA
atgtagatattgtgaagtac

SEQ ID NO: 4734 - RNA, 20 nt, synthetic construct
  source 1..20: mol_type = other RNA
atgtagatgtgcatttttgt

SEQ ID NO: 4735 - RNA, 20 nt, synthetic construct
  source 1..20: mol_type = other RNA
atgtatctgaaagacagtcc

SEQ ID NO: 4736 - RNA, 20 nt, synthetic construct
  source 1..20: mol_type = other RNA
atgtcaacgtatctgagctc

SEQ ID NO: 4737 - RNA, 20 nt, synthetic construct
  source 1..20: mol_type = other RNA
atgtctgtagctcctcaact

SEQ ID NO: 4738 - RNA, 20 nt, synthetic construct
  source 1..20: mol_type = other RNA
atgtcttcttacttgacctc

SEQ ID NO: 4739 - RNA, 20 nt, synthetic construct
  source 1..20: mol_type = other RNA
atgtgaagagggagaagcat

SEQ ID NO: 4740 - RNA, 20 nt, synthetic construct
  source 1..20: mol_type = other RNA
atgtgcatttttgtgaaatg

SEQ ID NO: 4741 - RNA, 20 nt, synthetic construct
  source 1..20: mol_type = other RNA
atgtgggcccgcagcagcta

SEQ ID NO: 4742 - RNA, 20 nt, synthetic construct
  source 1..20: mol_type = other RNA
atgtgtatttccagtgcaat

SEQ ID NO: 4743 - RNA, 20 nt, synthetic construct
  source 1..20: mol_type = other RNA
atgttcttccgtcatattcc

SEQ ID NO: 4744 - RNA, 20 nt, synthetic construct
  source 1..20: mol_type = other RNA
atgttgtattcagtgagggt

SEQ ID NO: 4745 - RNA, 20 nt, synthetic construct
  source 1..20: mol_type = other RNA
atgtttatgagccagacaaa

SEQ ID NO: 4746 - RNA, 20 nt, synthetic construct
  source 1..20: mol_type = other RNA
atgttttggggactcatttc

SEQ ID NO: 4747 - RNA, 20 nt, synthetic construct
  source 1..20: mol_type = other RNA
attacatgttttcatttcac

SEQ ID NO: 4748 - RNA, 20 nt, synthetic construct
  source 1..20: mol_type = other RNA
attagagttgattgtcagga

SEQ ID NO: 4749 - RNA, 20 nt, synthetic construct
  source 1..20: mol_type = other RNA
attaggaaaatatgggttgc

SEQ ID NO: 4750 - RNA, 20 nt, synthetic construct
  source 1..20: mol_type = other RNA
attaggtgagttgaggagct

SEQ ID NO: 4751 - RNA, 20 nt, synthetic construct
  source 1..20: mol_type = other RNA
attagtagctgacaatcaat

SEQ ID NO: 4752 - RNA, 20 nt, synthetic construct
  source 1..20: mol_type = other RNA
attatgattctttgttacag

SEQ ID NO: 4753 - RNA, 20 nt, synthetic construct
  source 1..20: mol_type = other RNA
attatgcaagcctctagtct

SEQ ID NO: 4754 - RNA, 20 nt, synthetic construct
  source 1..20: mol_type = other RNA
attcaaaatcttgaccaaat

SEQ ID NO: 4755 - RNA, 20 nt, synthetic construct
  source 1..20: mol_type = other RNA
attcagtgagggtcttctta

SEQ ID NO: 4756 - RNA, 20 nt, synthetic construct
  source 1..20: mol_type = other RNA
attccaaagtatacttccgg

SEQ ID NO: 4757 - RNA, 20 nt, synthetic construct
  source 1..20: mol_type = other RNA
attccagaggcatggacctt

SEQ ID NO: 4758 - RNA, 20 nt, synthetic construct
  source 1..20: mol_type = other RNA
attccataggtgtcttccca

SEQ ID NO: 4759 - RNA, 20 nt, synthetic construct
  source 1..20: mol_type = other RNA
attcctaacacagcatgtgt

SEQ ID NO: 4760 - RNA, 20 nt, synthetic construct
  source 1..20: mol_type = other RNA
attcctcaaaattgaccaga

SEQ ID NO: 4761 - RNA, 20 nt, synthetic construct
  source 1..20: mol_type = other RNA
attcctccatttgtctggct

SEQ ID NO: 4762 - RNA, 20 nt, synthetic construct
  source 1..20: mol_type = other RNA
attccttgttgaaagctcct

SEQ ID NO: 4763 - RNA, 20 nt, synthetic construct
  source 1..20: mol_type = other RNA
attctcggtgcctgtaacaa

SEQ ID NO: 4764 - RNA, 20 nt, synthetic construct
  source 1..20: mol_type = other RNA
attctctctttagtcataca

SEQ ID NO: 4765 - RNA, 20 nt, synthetic construct
  source 1..20: mol_type = other RNA
attctttccattatgattct

SEQ ID NO: 4766 - RNA, 20 nt, synthetic construct
  source 1..20: mol_type = other RNA
attctttgttacaggcaccg

SEQ ID NO: 4767 - RNA, 20 nt, synthetic construct
  source 1..20: mol_type = other RNA
attgaaaaggacacctttta

SEQ ID NO: 4768 - RNA, 20 nt, synthetic construct
  source 1..20: mol_type = other RNA
attgaacactgcccccaggt

SEQ ID NO: 4769 - RNA, 20 nt, synthetic construct
  source 1..20: mol_type = other RNA
attgaccagagagagctcag

SEQ ID NO: 4770 - RNA, 20 nt, synthetic construct
  source 1..20: mol_type = other RNA
attgaccccggaagtatact

SEQ ID NO: 4771 - RNA, 20 nt, synthetic construct
  source 1..20: mol_type = other RNA
attgatcacaaggccaccct

SEQ ID NO: 4772 - RNA, 20 nt, synthetic construct
  source 1..20: mol_type = other RNA
attgattgtcagctactaat

SEQ ID NO: 4773 - RNA, 20 nt, synthetic construct
  source 1..20: mol_type = other RNA
attgcactggaaatacacat

SEQ ID NO: 4774 - RNA, 20 nt, synthetic construct
  source 1..20: mol_type = other RNA
attggcctctttcagcctct

SEQ ID NO: 4775 - RNA, 20 nt, synthetic construct
  source 1..20: mol_type = other RNA
attgtcagctactaatgatg

SEQ ID NO: 4776 - RNA, 20 nt, synthetic construct
  source 1..20: mol_type = other RNA
attgtcaggaagcattcaaa

SEQ ID NO: 4777 - RNA, 20 nt, synthetic construct
  source 1..20: mol_type = other RNA
attgtcctgctttctggagt

SEQ ID NO: 4778 - RNA, 20 nt, synthetic construct
  source 1..20: mol_type = other RNA
attgtgaagtacatattagg

SEQ ID NO: 4779 - RNA, 20 nt, synthetic construct
  source 1..20: mol_type = other RNA
atttaagggatggaaaagga

SEQ ID NO: 4780 - RNA, 20 nt, synthetic construct
  source 1..20: mol_type = other RNA
atttagaagtgaagatgctg

SEQ ID NO: 4781 - RNA, 20 nt, synthetic construct
  source 1..20: mol_type = other RNA
atttaggcagattgaaaagg

SEQ ID NO: 4782 - RNA, 20 nt, synthetic construct
  source 1..20: mol_type = other RNA
atttatatgtcaacgtatct

SEQ ID NO: 4783 - RNA, 20 nt, synthetic construct
  source 1..20: mol_type = other RNA
atttatgtagatgtgcattt

SEQ ID NO: 4784 - RNA, 20 nt, synthetic construct
  source 1..20: mol_type = other RNA
atttatttcaggcaagtcca

SEQ ID NO: 4785 - RNA, 20 nt, synthetic construct
  source 1..20: mol_type = other RNA
atttcacaaaaatgcacatc

SEQ ID NO: 4786 - RNA, 20 nt, synthetic construct
  source 1..20: mol_type = other RNA
atttcaggcaagtccaactc

SEQ ID NO: 4787 - RNA, 20 nt, synthetic construct
  source 1..20: mol_type = other RNA
atttcattcctaacacagca

SEQ ID NO: 4788 - RNA, 20 nt, synthetic construct
  source 1..20: mol_type = other RNA
atttccagtgcaattgtagg

SEQ ID NO: 4789 - RNA, 20 nt, synthetic construct
  source 1..20: mol_type = other RNA
atttgaggtcaagtaagaag

SEQ ID NO: 4790 - RNA, 20 nt, synthetic construct
  source 1..20: mol_type = other RNA
atttggtcaagattttgaat

SEQ ID NO: 4791 - RNA, 20 nt, synthetic construct
  source 1..20: mol_type = other RNA
atttgtatcctaacatatac

SEQ ID NO: 4792 - RNA, 20 nt, synthetic construct
  source 1..20: mol_type = other RNA
atttgtctggctcataaaca

SEQ ID NO: 4793 - RNA, 20 nt, synthetic construct
  source 1..20: mol_type = other RNA
attttcctaatatgtacttc

SEQ ID NO: 4794 - RNA, 20 nt, synthetic construct
  source 1..20: mol_type = other RNA
attttgaaccctgtggtctc

SEQ ID NO: 4795 - RNA, 20 nt, synthetic construct
  source 1..20: mol_type = other RNA
attttgaatgcttcctgaca

SEQ ID NO: 4796 - RNA, 20 nt, synthetic construct
  source 1..20: mol_type = other RNA
attttgaggaatctcagacg

SEQ ID NO: 4797 - RNA, 20 nt, synthetic construct
  source 1..20: mol_type = other RNA
atttttaagcactattagag

SEQ ID NO: 4798 - RNA, 20 nt, synthetic construct
  source 1..20: mol_type = other RNA
caaaaatgcacatctacata

SEQ ID NO: 4799 - RNA, 20 nt, synthetic construct
  source 1..20: mol_type = other RNA
caaaacatctctcttgctta

SEQ ID NO: 4800 - RNA, 20 nt, synthetic construct
  source 1..20: mol_type = other RNA
caaaaggagctttcaacaag

SEQ ID NO: 4801 - RNA, 20 nt, synthetic construct
  source 1..20: mol_type = other RNA
caaaatcttgaccaaatgca

SEQ ID NO: 4802 - RNA, 20 nt, synthetic construct
  source 1..20: mol_type = other RNA
caaaatgtctgtagctcctc

SEQ ID NO: 4803 - RNA, 20 nt, synthetic construct
  source 1..20: mol_type = other RNA
caaaattgaccagagagagc

SEQ ID NO: 4804 - RNA, 20 nt, synthetic construct
  source 1..20: mol_type = other RNA
caaagaatcataatggaaag

SEQ ID NO: 4805 - RNA, 20 nt, synthetic construct
  source 1..20: mol_type = other RNA
caaagtacagcccagtttca

SEQ ID NO: 4806 - RNA, 20 nt, synthetic construct
  source 1..20: mol_type = other RNA
caaagtatacttccggggtc

SEQ ID NO: 4807 - RNA, 20 nt, synthetic construct
  source 1..20: mol_type = other RNA
caaagtgcttctcttagagc

SEQ ID NO: 4808 - RNA, 20 nt, synthetic construct
  source 1..20: mol_type = other RNA
caaatgcaacccatattttc

SEQ ID NO: 4809 - RNA, 20 nt, synthetic construct
  source 1..20: mol_type = other RNA
caaatgcatgtaagaagacc

SEQ ID NO: 4810 - RNA, 20 nt, synthetic construct
  source 1..20: mol_type = other RNA
caaatggaggaatatgacgg

SEQ ID NO: 4811 - RNA, 20 nt, synthetic construct
  source 1..20: mol_type = other RNA
caacaacctgcccctgagcc

SEQ ID NO: 4812 - RNA, 20 nt, synthetic construct
  source 1..20: mol_type = other RNA
caacattctcggtgcctgta

SEQ ID NO: 4813 - RNA, 20 nt, synthetic construct
  source 1..20: mol_type = other RNA
caaccatgtatctgaaagac

SEQ ID NO: 4814 - RNA, 20 nt, synthetic construct
  source 1..20: mol_type = other RNA
caacccatattttcctaata

SEQ ID NO: 4815 - RNA, 20 nt, synthetic construct
  source 1..20: mol_type = other RNA
caacctgcccctgagccaca

SEQ ID NO: 4816 - RNA, 20 nt, synthetic construct
  source 1..20: mol_type = other RNA
caacgtatctgagctctctc

SEQ ID NO: 4817 - RNA, 20 nt, synthetic construct
  source 1..20: mol_type = other RNA
caactcaaggtccatgcctc

SEQ ID NO: 4818 - RNA, 20 nt, synthetic construct
  source 1..20: mol_type = other RNA
caactcacctaatgtttatg

SEQ ID NO: 4819 - RNA, 20 nt, synthetic construct
  source 1..20: mol_type = other RNA
caactctaatagtgcttaaa

SEQ ID NO: 4820 - RNA, 20 nt, synthetic construct
  source 1..20: mol_type = other RNA
caagagagatgttttgggga

SEQ ID NO: 4821 - RNA, 20 nt, synthetic construct
  source 1..20: mol_type = other RNA
caagattgaccccggaagta

SEQ ID NO: 4822 - RNA, 20 nt, synthetic construct
  source 1..20: mol_type = other RNA
caagattttgaatgcttcct

SEQ ID NO: 4823 - RNA, 20 nt, synthetic construct
  source 1..20: mol_type = other RNA
caagcctctagtcttccttt

SEQ ID NO: 4824 - RNA, 20 nt, synthetic construct
  source 1..20: mol_type = other RNA
caaggccacccttcttatac

SEQ ID NO: 4825 - RNA, 20 nt, synthetic construct
  source 1..20: mol_type = other RNA
caaggcccaccttgagaggt

SEQ ID NO: 4826 - RNA, 20 nt, synthetic construct
  source 1..20: mol_type = other RNA
caagggggactgtctttcag

SEQ ID NO: 4827 - RNA, 20 nt, synthetic construct
  source 1..20: mol_type = other RNA
caaggtccacttggttcatg

SEQ ID NO: 4828 - RNA, 20 nt, synthetic construct
  source 1..20: mol_type = other RNA
caaggtccatgcctctggaa

SEQ ID NO: 4829 - RNA, 20 nt, synthetic construct
  source 1..20: mol_type = other RNA
caaggtctacatgaggaact

SEQ ID NO: 4830 - RNA, 20 nt, synthetic construct
  source 1..20: mol_type = other RNA
caaggtgggccttgctacct

SEQ ID NO: 4831 - RNA, 20 nt, synthetic construct
  source 1..20: mol_type = other RNA
caagtaagaagacatgaacc

SEQ ID NO: 4832 - RNA, 20 nt, synthetic construct
  source 1..20: mol_type = other RNA
caagtccaactcaaggtcca

SEQ ID NO: 4833 - RNA, 20 nt, synthetic construct
  source 1..20: mol_type = other RNA
caagtggaccttgagaccac

SEQ ID NO: 4834 - RNA, 20 nt, synthetic construct
  source 1..20: mol_type = other RNA
caatatctacattctctctt

SEQ ID NO: 4835 - RNA, 20 nt, synthetic construct
  source 1..20: mol_type = other RNA
caatcaactctaatagtgct

SEQ ID NO: 4836 - RNA, 20 nt, synthetic construct
  source 1..20: mol_type = other RNA
caatcaatgatttttaagca

SEQ ID NO: 4837 - RNA, 20 nt, synthetic construct
  source 1..20: mol_type = other RNA
caatctgcctaaatactctc

SEQ ID NO: 4838 - RNA, 20 nt, synthetic construct
  source 1..20: mol_type = other RNA
caatcttaccagtgctgatc

SEQ ID NO: 4839 - RNA, 20 nt, synthetic construct
  source 1..20: mol_type = other RNA
caatcttgcaacaacctgcc

SEQ ID NO: 4840 - RNA, 20 nt, synthetic construct
  source 1..20: mol_type = other RNA
caatgaaactgggctgtact

SEQ ID NO: 4841 - RNA, 20 nt, synthetic construct
  source 1..20: mol_type = other RNA
caatgatttttaagcactat

SEQ ID NO: 4842 - RNA, 20 nt, synthetic construct
  source 1..20: mol_type = other RNA
caatgccccactggcagcat

SEQ ID NO: 4843 - RNA, 20 nt, synthetic construct
  source 1..20: mol_type = other RNA
caattccataggtgtcttcc

SEQ ID NO: 4844 - RNA, 20 nt, synthetic construct
  source 1..20: mol_type = other RNA
caattgcactggaaatacac

SEQ ID NO: 4845 - RNA, 20 nt, synthetic construct
  source 1..20: mol_type = other RNA
caattgtaggggtgtgtgtg

SEQ ID NO: 4846 - RNA, 20 nt, synthetic construct
  source 1..20: mol_type = other RNA
caattttgaggaatctcaga

SEQ ID NO: 4847 - RNA, 20 nt, synthetic construct
  source 1..20: mol_type = other RNA
cacaaaaatgcacatctaca

SEQ ID NO: 4848 - RNA, 20 nt, synthetic construct
  source 1..20: mol_type = other RNA
cacaaccatgtatctgaaag

SEQ ID NO: 4849 - RNA, 20 nt, synthetic construct
  source 1..20: mol_type = other RNA
cacaaggccacccttcttat

SEQ ID NO: 4850 - RNA, 20 nt, synthetic construct
  source 1..20: mol_type = other RNA
cacaaggtctacatgaggaa

SEQ ID NO: 4851 - RNA, 20 nt, synthetic construct
  source 1..20: mol_type = other RNA
cacaatatctacattctctc

SEQ ID NO: 4852 - RNA, 20 nt, synthetic construct
  source 1..20: mol_type = other RNA
cacacacacacccctacaat

SEQ ID NO: 4853 - RNA, 20 nt, synthetic construct
  source 1..20: mol_type = other RNA
cacacacacccctacaattg

SEQ ID NO: 4854 - RNA, 20 nt, synthetic construct
  source 1..20: mol_type = other RNA
cacacacccctacaattgca

SEQ ID NO: 4855 - RNA, 20 nt, synthetic construct
  source 1..20: mol_type = other RNA
cacacccctacaattgcact

SEQ ID NO: 4856 - RNA, 20 nt, synthetic construct
  source 1..20: mol_type = other RNA
cacagcatgtgtatttccag

SEQ ID NO: 4857 - RNA, 20 nt, synthetic construct
  source 1..20: mol_type = other RNA
cacagggttcaaaatgtctg

SEQ ID NO: 4858 - RNA, 20 nt, synthetic construct
  source 1..20: mol_type = other RNA
cacatctgcccagtagtgca

SEQ ID NO: 4859 - RNA, 20 nt, synthetic construct
  source 1..20: mol_type = other RNA
cacatgctgtgttaggaatg

SEQ ID NO: 4860 - RNA, 20 nt, synthetic construct
  source 1..20: mol_type = other RNA
cacatggcagcccagagttc

SEQ ID NO: 4861 - RNA, 20 nt, synthetic construct
  source 1..20: mol_type = other RNA
caccagatcctggggatact

SEQ ID NO: 4862 - RNA, 20 nt, synthetic construct
  source 1..20: mol_type = other RNA
cacccctacaattgcactgg

SEQ ID NO: 4863 - RNA, 20 nt, synthetic construct
  source 1..20: mol_type = other RNA
cacccttcttatacttcact

SEQ ID NO: 4864 - RNA, 20 nt, synthetic construct
  source 1..20: mol_type = other RNA
caccgagaatgttgtattca

SEQ ID NO: 4865 - RNA, 20 nt, synthetic construct
  source 1..20: mol_type = other RNA
caccgatggctcaggatatg

SEQ ID NO: 4866 - RNA, 20 nt, synthetic construct
  source 1..20: mol_type = other RNA
cacctaatgtttatgagcca

SEQ ID NO: 4867 - RNA, 20 nt, synthetic construct
  source 1..20: mol_type = other RNA
cacctatggaattgtcctgc

SEQ ID NO: 4868 - RNA, 20 nt, synthetic construct
  source 1..20: mol_type = other RNA
cacctctcaaggtgggcctt

SEQ ID NO: 4869 - RNA, 20 nt, synthetic construct
  source 1..20: mol_type = other RNA
cacctggtagctgctttttc

SEQ ID NO: 4870 - RNA, 20 nt, synthetic construct
  source 1..20: mol_type = other RNA
caccttgagaggtgagttaa

SEQ ID NO: 4871 - RNA, 20 nt, synthetic construct
  source 1..20: mol_type = other RNA
caccttttaactcacctctc

SEQ ID NO: 4872 - RNA, 20 nt, synthetic construct
  source 1..20: mol_type = other RNA
cactaagatgagtgtagaac

SEQ ID NO: 4873 - RNA, 20 nt, synthetic construct
  source 1..20: mol_type = other RNA
cactactgggcagatgtggg

SEQ ID NO: 4874 - RNA, 20 nt, synthetic construct
  source 1..20: mol_type = other RNA
cactattagagttgattgtc

SEQ ID NO: 4875 - RNA, 20 nt, synthetic construct
  source 1..20: mol_type = other RNA
cactcatcttagtgcctgag

SEQ ID NO: 4876 - RNA, 20 nt, synthetic construct
  source 1..20: mol_type = other RNA
cactccagaaagcaggacaa

SEQ ID NO: 4877 - RNA, 20 nt, synthetic construct
  source 1..20: mol_type = other RNA
cactgaatacaacattctcg

SEQ ID NO: 4878 - RNA, 20 nt, synthetic construct
  source 1..20: mol_type = other RNA
cactgcccccaggtagctgc

SEQ ID NO: 4879 - RNA, 20 nt, synthetic construct
  source 1..20: mol_type = other RNA
cactggaaatacacatgctg

SEQ ID NO: 4880 - RNA, 20 nt, synthetic construct
  source 1..20: mol_type = other RNA
cactggcagcatcttcactt

SEQ ID NO: 4881 - RNA, 20 nt, synthetic construct
  source 1..20: mol_type = other RNA
cactggtaagattgaacact

SEQ ID NO: 4882 - RNA, 20 nt, synthetic construct
  source 1..20: mol_type = other RNA
cacttctaaatgcatatcct

SEQ ID NO: 4883 - RNA, 20 nt, synthetic construct
  source 1..20: mol_type = other RNA
cacttggttcatgtcttctt

SEQ ID NO: 4884 - RNA, 20 nt, synthetic construct
  source 1..20: mol_type = other RNA
cactttgggattctttccat

SEQ ID NO: 4885 - RNA, 20 nt, synthetic construct
  source 1..20: mol_type = other RNA
cagaaagcaggacaattcca

SEQ ID NO: 4886 - RNA, 20 nt, synthetic construct
  source 1..20: mol_type = other RNA
cagacaaatggaggaatatg

SEQ ID NO: 4887 - RNA, 20 nt, synthetic construct
  source 1..20: mol_type = other RNA
cagacattttgaaccctgtg

SEQ ID NO: 4888 - RNA, 20 nt, synthetic construct
  source 1..20: mol_type = other RNA
cagacgtttttcggcttata

SEQ ID NO: 4889 - RNA, 20 nt, synthetic construct
  source 1..20: mol_type = other RNA
cagagagagctcagatacgt

SEQ ID NO: 4890 - RNA, 20 nt, synthetic construct
  source 1..20: mol_type = other RNA
cagaggcatggaccttgagt

SEQ ID NO: 4891 - RNA, 20 nt, synthetic construct
  source 1..20: mol_type = other RNA
cagagttctatgttcttccg

SEQ ID NO: 4892 - RNA, 20 nt, synthetic construct
  source 1..20: mol_type = other RNA
cagataagcaagagagatgt

SEQ ID NO: 4893 - RNA, 20 nt, synthetic construct
  source 1..20: mol_type = other RNA
cagatacatggttgtgacct

SEQ ID NO: 4894 - RNA, 20 nt, synthetic construct
  source 1..20: mol_type = other RNA
cagatacgttgacatataaa

SEQ ID NO: 4895 - RNA, 20 nt, synthetic construct
  source 1..20: mol_type = other RNA
cagatcctggggatacttag

SEQ ID NO: 4896 - RNA, 20 nt, synthetic construct
  source 1..20: mol_type = other RNA
cagatgtgggcccgcagcag

SEQ ID NO: 4897 - RNA, 20 nt, synthetic construct
  source 1..20: mol_type = other RNA
cagattgaaaaggacacctt

SEQ ID NO: 4898 - RNA, 20 nt, synthetic construct
  source 1..20: mol_type = other RNA
cagcactggtaagattgaac

SEQ ID NO: 4899 - RNA, 20 nt, synthetic construct
  source 1..20: mol_type = other RNA
cagcagctacctgggggcag

SEQ ID NO: 4900 - RNA, 20 nt, synthetic construct
  source 1..20: mol_type = other RNA
cagcatcttcacttctaaat

SEQ ID NO: 4901 - RNA, 20 nt, synthetic construct
  source 1..20: mol_type = other RNA
cagcatgtgtatttccagtg

SEQ ID NO: 4902 - RNA, 20 nt, synthetic construct
  source 1..20: mol_type = other RNA
cagcccagagttctatgttc

SEQ ID NO: 4903 - RNA, 20 nt, synthetic construct
  source 1..20: mol_type = other RNA
cagcccagtttcattgatca

SEQ ID NO: 4904 - RNA, 20 nt, synthetic construct
  source 1..20: mol_type = other RNA
cagcctctttagcttattat

SEQ ID NO: 4905 - RNA, 20 nt, synthetic construct
  source 1..20: mol_type = other RNA
cagctaccaggtgttctaca

SEQ ID NO: 4906 - RNA, 20 nt, synthetic construct
  source 1..20: mol_type = other RNA
cagctacctgggggcagtgt

SEQ ID NO: 4907 - RNA, 20 nt, synthetic construct
  source 1..20: mol_type = other RNA
cagctactaatgatgttttc

SEQ ID NO: 4908 - RNA, 20 nt, synthetic construct
  source 1..20: mol_type = other RNA
caggaagcattcaaaatctt

SEQ ID NO: 4909 - RNA, 20 nt, synthetic construct
  source 1..20: mol_type = other RNA
caggacaattccataggtgt

SEQ ID NO: 4910 - RNA, 20 nt, synthetic construct
  source 1..20: mol_type = other RNA
caggatatgcatttagaagt

SEQ ID NO: 4911 - RNA, 20 nt, synthetic construct
  source 1..20: mol_type = other RNA
caggatctggtgatgatgga

SEQ ID NO: 4912 - RNA, 20 nt, synthetic construct
  source 1..20: mol_type = other RNA
caggcaagtccaactcaagg

SEQ ID NO: 4913 - RNA, 20 nt, synthetic construct
  source 1..20: mol_type = other RNA
caggcaccgagaatgttgta

SEQ ID NO: 4914 - RNA, 20 nt, synthetic construct
  source 1..20: mol_type = other RNA
caggcactaagatgagtgta

SEQ ID NO: 4915 - RNA, 20 nt, synthetic construct
  source 1..20: mol_type = other RNA
caggggcaggttgttgcaag

SEQ ID NO: 4916 - RNA, 20 nt, synthetic construct
  source 1..20: mol_type = other RNA
cagggttcaaaatgtctgta

SEQ ID NO: 4917 - RNA, 20 nt, synthetic construct
  source 1..20: mol_type = other RNA
caggtagctgctgcgggccc

SEQ ID NO: 4918 - RNA, 20 nt, synthetic construct
  source 1..20: mol_type = other RNA
caggtcacaaccatgtatct

SEQ ID NO: 4919 - RNA, 20 nt, synthetic construct
  source 1..20: mol_type = other RNA
caggtgttctacactcatct

SEQ ID NO: 4920 - RNA, 20 nt, synthetic construct
  source 1..20: mol_type = other RNA
caggttgttgcaagattgac

SEQ ID NO: 4921 - RNA, 20 nt, synthetic construct
  source 1..20: mol_type = other RNA
cagtagctcatcatcttccc

SEQ ID NO: 4922 - RNA, 20 nt, synthetic construct
  source 1..20: mol_type = other RNA
cagtagtgcagtagctcatc

SEQ ID NO: 4923 - RNA, 20 nt, synthetic construct
  source 1..20: mol_type = other RNA
cagtcccccttgaggtagca

SEQ ID NO: 4924 - RNA, 20 nt, synthetic construct
  source 1..20: mol_type = other RNA
cagtgagggtcttcttacat

SEQ ID NO: 4925 - RNA, 20 nt, synthetic construct
  source 1..20: mol_type = other RNA
cagtgcaattgtaggggtgt

SEQ ID NO: 4926 - RNA, 20 nt, synthetic construct
  source 1..20: mol_type = other RNA
cagtgctgatcatttatatg

SEQ ID NO: 4927 - RNA, 20 nt, synthetic construct
  source 1..20: mol_type = other RNA
cagtggggcattggcctctt

SEQ ID NO: 4928 - RNA, 20 nt, synthetic construct
  source 1..20: mol_type = other RNA
cagtgttcaatcttaccagt

SEQ ID NO: 4929 - RNA, 20 nt, synthetic construct
  source 1..20: mol_type = other RNA
cagtttcattgatcacaagg

SEQ ID NO: 4930 - RNA, 20 nt, synthetic construct
  source 1..20: mol_type = other RNA
cataaacattaggtgagttg

SEQ ID NO: 4931 - RNA, 20 nt, synthetic construct
  source 1..20: mol_type = other RNA
cataataagctaaagaggct

SEQ ID NO: 4932 - RNA, 20 nt, synthetic construct
  source 1..20: mol_type = other RNA
cataatggaaagaatcccaa

SEQ ID NO: 4933 - RNA, 20 nt, synthetic construct
  source 1..20: mol_type = other RNA
catagaactctgggctgcca

SEQ ID NO: 4934 - RNA, 20 nt, synthetic construct
  source 1..20: mol_type = other RNA
cataggtgtcttcccattcc

SEQ ID NO: 4935 - RNA, 20 nt, synthetic construct
  source 1..20: mol_type = other RNA
catataaatgatcagcactg

SEQ ID NO: 4936 - RNA, 20 nt, synthetic construct
  source 1..20: mol_type = other RNA
catatcctgagccatcggtg

SEQ ID NO: 4937 - RNA, 20 nt, synthetic construct
  source 1..20: mol_type = other RNA
catattaggaaaatatgggt

SEQ ID NO: 4938 - RNA, 20 nt, synthetic construct
  source 1..20: mol_type = other RNA
catattcctccatttgtctg

SEQ ID NO: 4939 - RNA, 20 nt, synthetic construct
  source 1..20: mol_type = other RNA
catattttcctaatatgtac

SEQ ID NO: 4940 - RNA, 20 nt, synthetic construct
  source 1..20: mol_type = other RNA
catcaccagatcctggggat

SEQ ID NO: 4941 - RNA, 20 nt, synthetic construct
  source 1..20: mol_type = other RNA
catcatcaccagatcctggg

SEQ ID NO: 4942 - RNA, 20 nt, synthetic construct
  source 1..20: mol_type = other RNA
catcatcttcccctccatca

SEQ ID NO: 4943 - RNA, 20 nt, synthetic construct
  source 1..20: mol_type = other RNA
catcattagtagctgacaat

SEQ ID NO: 4944 - RNA, 20 nt, synthetic construct
  source 1..20: mol_type = other RNA
catcccttaaatcctcaggt

SEQ ID NO: 4945 - RNA, 20 nt, synthetic construct
  source 1..20: mol_type = other RNA
catcggtgaaactaacagat

SEQ ID NO: 4946 - RNA, 20 nt, synthetic construct
  source 1..20: mol_type = other RNA
catctctcttgcttatctgt

SEQ ID NO: 4947 - RNA, 20 nt, synthetic construct
  source 1..20: mol_type = other RNA
catctgcccagtagtgcagt

SEQ ID NO: 4948 - RNA, 20 nt, synthetic construct
  source 1..20: mol_type = other RNA
catcttagtgcctgagagta

SEQ ID NO: 4949 - RNA, 20 nt, synthetic construct
  source 1..20: mol_type = other RNA
catcttcacttctaaatgca

SEQ ID NO: 4950 - RNA, 20 nt, synthetic construct
  source 1..20: mol_type = other RNA
catcttcccctccatcatca

SEQ ID NO: 4951 - RNA, 20 nt, synthetic construct
  source 1..20: mol_type = other RNA
catgaaaaagcagctaccag

SEQ ID NO: 4952 - RNA, 20 nt, synthetic construct
  source 1..20: mol_type = other RNA
catgaaccaagtggaccttg

SEQ ID NO: 4953 - RNA, 20 nt, synthetic construct
  source 1..20: mol_type = other RNA
catgactattccttgttgaa

SEQ ID NO: 4954 - RNA, 20 nt, synthetic construct
  source 1..20: mol_type = other RNA
catgaggaactctaagtatc

SEQ ID NO: 4955 - RNA, 20 nt, synthetic construct
  source 1..20: mol_type = other RNA
catgcatttgaggtcaagta

SEQ ID NO: 4956 - RNA, 20 nt, synthetic construct
  source 1..20: mol_type = other RNA
catgcctctggaatgggaag

SEQ ID NO: 4957 - RNA, 20 nt, synthetic construct
  source 1..20: mol_type = other RNA
catgctgtgttaggaatgaa

SEQ ID NO: 4958 - RNA, 20 nt, synthetic construct
  source 1..20: mol_type = other RNA
catgcttctccctcttcaca

SEQ ID NO: 4959 - RNA, 20 nt, synthetic construct
  source 1..20: mol_type = other RNA
catggaccttgagttggact

SEQ ID NO: 4960 - RNA, 20 nt, synthetic construct
  source 1..20: mol_type = other RNA
catggcagcccagagttcta

SEQ ID NO: 4961 - RNA, 20 nt, synthetic construct
  source 1..20: mol_type = other RNA
catggttgtgacctgaggat

SEQ ID NO: 4962 - RNA, 20 nt, synthetic construct
  source 1..20: mol_type = other RNA
catgtaagaagaccctcact

SEQ ID NO: 4963 - RNA, 20 nt, synthetic construct
  source 1..20: mol_type = other RNA
catgtagaccttgtggctca

SEQ ID NO: 4964 - RNA, 20 nt, synthetic construct
  source 1..20: mol_type = other RNA
catgtatctgaaagacagtc

SEQ ID NO: 4965 - RNA, 20 nt, synthetic construct
  source 1..20: mol_type = other RNA
catgtcttcttacttgacct

SEQ ID NO: 4966 - RNA, 20 nt, synthetic construct
  source 1..20: mol_type = other RNA
catgtgaagagggagaagca

SEQ ID NO: 4967 - RNA, 20 nt, synthetic construct
  source 1..20: mol_type = other RNA
catgtgtatttccagtgcaa

SEQ ID NO: 4968 - RNA, 20 nt, synthetic construct
  source 1..20: mol_type = other RNA
catgttttcatttcacaaaa

SEQ ID NO: 4969 - RNA, 20 nt, synthetic construct
  source 1..20: mol_type = other RNA
cattaggtgagttgaggagc

SEQ ID NO: 4970 - RNA, 20 nt, synthetic construct
  source 1..20: mol_type = other RNA
cattagtagctgacaatcaa

SEQ ID NO: 4971 - RNA, 20 nt, synthetic construct
  source 1..20: mol_type = other RNA
cattatgattctttgttaca

SEQ ID NO: 4972 - RNA, 20 nt, synthetic construct
  source 1..20: mol_type = other RNA
cattcaaaatcttgaccaaa

SEQ ID NO: 4973 - RNA, 20 nt, synthetic construct
  source 1..20: mol_type = other RNA
cattccagaggcatggacct

SEQ ID NO: 4974 - RNA, 20 nt, synthetic construct
  source 1..20: mol_type = other RNA
cattcctaacacagcatgtg

SEQ ID NO: 4975 - RNA, 20 nt, synthetic construct
  source 1..20: mol_type = other RNA
cattctcggtgcctgtaaca

SEQ ID NO: 4976 - RNA, 20 nt, synthetic construct
  source 1..20: mol_type = other RNA
cattctctctttagtcatac

SEQ ID NO: 4977 - RNA, 20 nt, synthetic construct
  source 1..20: mol_type = other RNA
cattgatcacaaggccaccc

SEQ ID NO: 4978 - RNA, 20 nt, synthetic construct
  source 1..20: mol_type = other RNA
cattgattgtcagctactaa

SEQ ID NO: 4979 - RNA, 20 nt, synthetic construct
  source 1..20: mol_type = other RNA
cattggcctctttcagcctc

SEQ ID NO: 4980 - RNA, 20 nt, synthetic construct
  source 1..20: mol_type = other RNA
catttagaagtgaagatgct

SEQ ID NO: 4981 - RNA, 20 nt, synthetic construct
  source 1..20: mol_type = other RNA
catttatatgtcaacgtatc

SEQ ID NO: 4982 - RNA, 20 nt, synthetic construct
  source 1..20: mol_type = other RNA
catttcacaaaaatgcacat

SEQ ID NO: 4983 - RNA, 20 nt, synthetic construct
  source 1..20: mol_type = other RNA
catttcattcctaacacagc

SEQ ID NO: 4984 - RNA, 20 nt, synthetic construct
  source 1..20: mol_type = other RNA
catttgaggtcaagtaagaa

SEQ ID NO: 4985 - RNA, 20 nt, synthetic construct
  source 1..20: mol_type = other RNA
catttggtcaagattttgaa

SEQ ID NO: 4986 - RNA, 20 nt, synthetic construct
  source 1..20: mol_type = other RNA
catttgtctggctcataaac

SEQ ID NO: 4987 - RNA, 20 nt, synthetic construct
  source 1..20: mol_type = other RNA
cattttgaaccctgtggtct

SEQ ID NO: 4988 - RNA, 20 nt, synthetic construct
  source 1..20: mol_type = other RNA
catttttgtgaaatgaaaac

SEQ ID NO: 4989 - RNA, 20 nt, synthetic construct
  source 1..20: mol_type = other RNA
ccaaaacatctctcttgctt

SEQ ID NO: 4990 - RNA, 20 nt, synthetic construct
  source 1..20: mol_type = other RNA
ccaaaaggagctttcaacaa

SEQ ID NO: 4991 - RNA, 20 nt, synthetic construct
  source 1..20: mol_type = other RNA
ccaaagtatacttccggggt

SEQ ID NO: 4992 - RNA, 20 nt, synthetic construct
  source 1..20: mol_type = other RNA
ccaaagtgcttctcttagag

SEQ ID NO: 4993 - RNA, 20 nt, synthetic construct
  source 1..20: mol_type = other RNA
ccaaatgcaacccatatttt

SEQ ID NO: 4994 - RNA, 20 nt, synthetic construct
  source 1..20: mol_type = other RNA
ccaactcaaggtccatgcct

SEQ ID NO: 4995 - RNA, 20 nt, synthetic construct
  source 1..20: mol_type = other RNA
ccaagtggaccttgagacca

SEQ ID NO: 4996 - RNA, 20 nt, synthetic construct
  source 1..20: mol_type = other RNA
ccaatgccccactggcagca

SEQ ID NO: 4997 - RNA, 20 nt, synthetic construct
  source 1..20: mol_type = other RNA
ccacaaggtctacatgagga

SEQ ID NO: 4998 - RNA, 20 nt, synthetic construct
  source 1..20: mol_type = other RNA
ccacagggttcaaaatgtct

SEQ ID NO: 4999 - RNA, 20 nt, synthetic construct
  source 1..20: mol_type = other RNA
ccacatctgcccagtagtgc

SEQ ID NO: 5000 - RNA, 20 nt, synthetic construct
  source 1..20: mol_type = other RNA
ccacccttcttatacttcac

SEQ ID NO: 5001 - RNA, 20 nt, synthetic construct
  source 1..20: mol_type = other RNA
ccaccttgagaggtgagtta

SEQ ID NO: 5002 - RNA, 20 nt, synthetic construct
  source 1..20: mol_type = other RNA
ccactggcagcatcttcact

SEQ ID NO: 5003 - RNA, 20 nt, synthetic construct
  source 1..20: mol_type = other RNA
ccacttggttcatgtcttct

SEQ ID NO: 5004 - RNA, 20 nt, synthetic construct
  source 1..20: mol_type = other RNA
ccagaaagcaggacaattcc

SEQ ID NO: 5005 - RNA, 20 nt, synthetic construct
  source 1..20: mol_type = other RNA
ccagacaaatggaggaatat

SEQ ID NO: 5006 - RNA, 20 nt, synthetic construct
  source 1..20: mol_type = other RNA
ccagagagagctcagatacg

SEQ ID NO: 5007 - RNA, 20 nt, synthetic construct
  source 1..20: mol_type = other RNA
ccagaggcatggaccttgag

SEQ ID NO: 5008 - RNA, 20 nt, synthetic construct
  source 1..20: mol_type = other RNA
ccagagttctatgttcttcc

SEQ ID NO: 5009 - RNA, 20 nt, synthetic construct
  source 1..20: mol_type = other RNA
ccagatcctggggatactta

SEQ ID NO: 5010 - RNA, 20 nt, synthetic construct
  source 1..20: mol_type = other RNA
ccaggatctggtgatgatgg

SEQ ID NO: 5011 - RNA, 20 nt, synthetic construct
  source 1..20: mol_type = other RNA
ccaggtagctgctgcgggcc

SEQ ID NO: 5012 - RNA, 20 nt, synthetic construct
  source 1..20: mol_type = other RNA
ccaggtgttctacactcatc

SEQ ID NO: 5013 - RNA, 20 nt, synthetic construct
  source 1..20: mol_type = other RNA
ccagtagtgcagtagctcat

SEQ ID NO: 5014 - RNA, 20 nt, synthetic construct
  source 1..20: mol_type = other RNA
ccagtgcaattgtaggggtg

SEQ ID NO: 5015 - RNA, 20 nt, synthetic construct
  source 1..20: mol_type = other RNA
ccagtgctgatcatttatat

SEQ ID NO: 5016 - RNA, 20 nt, synthetic construct
  source 1..20: mol_type = other RNA
ccagtggggcattggcctct

SEQ ID NO: 5017 - RNA, 20 nt, synthetic construct
  source 1..20: mol_type = other RNA
ccagtttcattgatcacaag

SEQ ID NO: 5018 - RNA, 20 nt, synthetic construct
  source 1..20: mol_type = other RNA
ccataggtgtcttcccattc

SEQ ID NO: 5019 - RNA, 20 nt, synthetic construct
  source 1..20: mol_type = other RNA
ccatattttcctaatatgta

SEQ ID NO: 5020 - RNA, 20 nt, synthetic construct
  source 1..20: mol_type = other RNA
ccatcatcaccagatcctgg

SEQ ID NO: 5021 - RNA, 20 nt, synthetic construct
  source 1..20: mol_type = other RNA
ccatcccttaaatcctcagg

SEQ ID NO: 5022 - RNA, 20 nt, synthetic construct
  source 1..20: mol_type = other RNA
ccatcggtgaaactaacaga

SEQ ID NO: 5023 - RNA, 20 nt, synthetic construct
  source 1..20: mol_type = other RNA
ccatgcctctggaatgggaa

SEQ ID NO: 5024 - RNA, 20 nt, synthetic construct
  source 1..20: mol_type = other RNA
ccatgtatctgaaagacagt

SEQ ID NO: 5025 - RNA, 20 nt, synthetic construct
  source 1..20: mol_type = other RNA
ccatgtgaagagggagaagc

SEQ ID NO: 5026 - RNA, 20 nt, synthetic construct
  source 1..20: mol_type = other RNA
ccattatgattctttgttac

SEQ ID NO: 5027 - RNA, 20 nt, synthetic construct
  source 1..20: mol_type = other RNA
ccattccagaggcatggacc

SEQ ID NO: 5028 - RNA, 20 nt, synthetic construct
  source 1..20: mol_type = other RNA
ccatttgtctggctcataaa

SEQ ID NO: 5029 - RNA, 20 nt, synthetic construct
  source 1..20: mol_type = other RNA
cccaaaacatctctcttgct

SEQ ID NO: 5030 - RNA, 20 nt, synthetic construct
  source 1..20: mol_type = other RNA
cccaaagtgcttctcttaga

SEQ ID NO: 5031 - RNA, 20 nt, synthetic construct
  source 1..20: mol_type = other RNA
cccacatctgcccagtagtg

SEQ ID NO: 5032 - RNA, 20 nt, synthetic construct
  source 1..20: mol_type = other RNA
cccaccttgagaggtgagtt

SEQ ID NO: 5033 - RNA, 20 nt, synthetic construct
  source 1..20: mol_type = other RNA
cccactggcagcatcttcac

SEQ ID NO: 5034 - RNA, 20 nt, synthetic construct
  source 1..20: mol_type = other RNA
cccagagttctatgttcttc

SEQ ID NO: 5035 - RNA, 20 nt, synthetic construct
  source 1..20: mol_type = other RNA
cccaggatctggtgatgatg

SEQ ID NO: 5036 - RNA, 20 nt, synthetic construct
  source 1..20: mol_type = other RNA
cccaggtagctgctgcgggc

SEQ ID NO: 5037 - RNA, 20 nt, synthetic construct
  source 1..20: mol_type = other RNA
cccagtagtgcagtagctca

SEQ ID NO: 5038 - RNA, 20 nt, synthetic construct
  source 1..20: mol_type = other RNA
cccagtttcattgatcacaa

SEQ ID NO: 5039 - RNA, 20 nt, synthetic construct
  source 1..20: mol_type = other RNA
cccatattttcctaatatgt

SEQ ID NO: 5040 - RNA, 20 nt, synthetic construct
  source 1..20: mol_type = other RNA
cccattccagaggcatggac

SEQ ID NO: 5041 - RNA, 20 nt, synthetic construct
  source 1..20: mol_type = other RNA
ccccaaaacatctctcttgc

SEQ ID NO: 5042 - RNA, 20 nt, synthetic construct
  source 1..20: mol_type = other RNA
ccccactggcagcatcttca

SEQ ID NO: 5043 - RNA, 20 nt, synthetic construct
  source 1..20: mol_type = other RNA
ccccaggatctggtgatgat

SEQ ID NO: 5044 - RNA, 20 nt, synthetic construct
  source 1..20: mol_type = other RNA
ccccaggtagctgctgcggg

SEQ ID NO: 5045 - RNA, 20 nt, synthetic construct
  source 1..20: mol_type = other RNA
cccccaggtagctgctgcgg

SEQ ID NO: 5046 - RNA, 20 nt, synthetic construct
  source 1..20: mol_type = other RNA
cccccttgaggtagcaaggc

SEQ ID NO: 5047 - RNA, 20 nt, synthetic construct
  source 1..20: mol_type = other RNA
ccccggaagtatactttgga

SEQ ID NO: 5048 - RNA, 20 nt, synthetic construct
  source 1..20: mol_type = other RNA
cccctacaattgcactggaa

SEQ ID NO: 5049 - RNA, 20 nt, synthetic construct
  source 1..20: mol_type = other RNA
cccctccatcatcaccagat

SEQ ID NO: 5050 - RNA, 20 nt, synthetic construct
  source 1..20: mol_type = other RNA
cccctgagccacaaggtcta

SEQ ID NO: 5051 - RNA, 20 nt, synthetic construct
  source 1..20: mol_type = other RNA
ccccttgaggtagcaaggcc

SEQ ID NO: 5052 - RNA, 20 nt, synthetic construct
  source 1..20: mol_type = other RNA
cccgcagcagctacctgggg

SEQ ID NO: 5053 - RNA, 20 nt, synthetic construct
  source 1..20: mol_type = other RNA
cccggaagtatactttggaa

SEQ ID NO: 5054 - RNA, 20 nt, synthetic construct
  source 1..20: mol_type = other RNA
ccctacaattgcactggaaa

SEQ ID NO: 5055 - RNA, 20 nt, synthetic construct
  source 1..20: mol_type = other RNA
ccctcactgaatacaacatt

SEQ ID NO: 5056 - RNA, 20 nt, synthetic construct
  source 1..20: mol_type = other RNA
ccctccatcatcaccagatc

SEQ ID NO: 5057 - RNA, 20 nt, synthetic construct
  source 1..20: mol_type = other RNA
ccctcttcacatggcagccc

SEQ ID NO: 5058 - RNA, 20 nt, synthetic construct
  source 1..20: mol_type = other RNA
ccctgagccacaaggtctac

SEQ ID NO: 5059 - RNA, 20 nt, synthetic construct
  source 1..20: mol_type = other RNA
ccctgtggtctcaaggtcca

SEQ ID NO: 5060 - RNA, 20 nt, synthetic construct
  source 1..20: mol_type = other RNA
cccttaaatcctcaggtcac

SEQ ID NO: 5061 - RNA, 20 nt, synthetic construct
  source 1..20: mol_type = other RNA
cccttcttatacttcactcc

SEQ ID NO: 5062 - RNA, 20 nt, synthetic construct
  source 1..20: mol_type = other RNA
cccttgaggtagcaaggccc

SEQ ID NO: 5063 - RNA, 20 nt, synthetic construct
  source 1..20: mol_type = other RNA
ccgaaaaacgtctgagattc

SEQ ID NO: 5064 - RNA, 20 nt, synthetic construct
  source 1..20: mol_type = other RNA
ccgagaatgttgtattcagt

SEQ ID NO: 5065 - RNA, 20 nt, synthetic construct
  source 1..20: mol_type = other RNA
ccgatggctcaggatatgca

SEQ ID NO: 5066 - RNA, 20 nt, synthetic construct
  source 1..20: mol_type = other RNA
ccgcagcagctacctggggg

SEQ ID NO: 5067 - RNA, 20 nt, synthetic construct
  source 1..20: mol_type = other RNA
ccggaagtatactttggaat

SEQ ID NO: 5068 - RNA, 20 nt, synthetic construct
  source 1..20: mol_type = other RNA
ccggggtcaatcttgcaaca

SEQ ID NO: 5069 - RNA, 20 nt, synthetic construct
  source 1..20: mol_type = other RNA
ccgtcatattcctccatttg

SEQ ID NO: 5070 - RNA, 20 nt, synthetic construct
  source 1..20: mol_type = other RNA
cctaaatactctcaggcact

SEQ ID NO: 5071 - RNA, 20 nt, synthetic construct
  source 1..20: mol_type = other RNA
cctaacacagcatgtgtatt

SEQ ID NO: 5072 - RNA, 20 nt, synthetic construct
  source 1..20: mol_type = other RNA
cctaatatgtacttcacaat

SEQ ID NO: 5073 - RNA, 20 nt, synthetic construct
  source 1..20: mol_type = other RNA
cctaatgtttatgagccaga

SEQ ID NO: 5074 - RNA, 20 nt, synthetic construct
  source 1..20: mol_type = other RNA
cctacaattgcactggaaat

SEQ ID NO: 5075 - RNA, 20 nt, synthetic construct
  source 1..20: mol_type = other RNA
cctatggaattgtcctgctt

SEQ ID NO: 5076 - RNA, 20 nt, synthetic construct
  source 1..20: mol_type = other RNA
cctcaaaattgaccagagag

SEQ ID NO: 5077 - RNA, 20 nt, synthetic construct
  source 1..20: mol_type = other RNA
cctcaaatgcatgtaagaag

SEQ ID NO: 5078 - RNA, 20 nt, synthetic construct
  source 1..20: mol_type = other RNA
cctcaactcacctaatgttt

SEQ ID NO: 5079 - RNA, 20 nt, synthetic construct
  source 1..20: mol_type = other RNA
cctcaagggggactgtcttt

SEQ ID NO: 5080 - RNA, 20 nt, synthetic construct
  source 1..20: mol_type = other RNA
cctcactgaatacaacattc

SEQ ID NO: 5081 - RNA, 20 nt, synthetic construct
  source 1..20: mol_type = other RNA
cctcaggtcacaaccatgta

SEQ ID NO: 5082 - RNA, 20 nt, synthetic construct
  source 1..20: mol_type = other RNA
cctcatgtagaccttgtggc

SEQ ID NO: 5083 - RNA, 20 nt, synthetic construct
  source 1..20: mol_type = other RNA
cctccatcatcaccagatcc

SEQ ID NO: 5084 - RNA, 20 nt, synthetic construct
  source 1..20: mol_type = other RNA
cctccatttgtctggctcat

SEQ ID NO: 5085 - RNA, 20 nt, synthetic construct
  source 1..20: mol_type = other RNA
cctctagtcttccttttcca

SEQ ID NO: 5086 - RNA, 20 nt, synthetic construct
  source 1..20: mol_type = other RNA
cctctcaaggtgggccttgc

SEQ ID NO: 5087 - RNA, 20 nt, synthetic construct
  source 1..20: mol_type = other RNA
cctctggaatgggaagacac

SEQ ID NO: 5088 - RNA, 20 nt, synthetic construct
  source 1..20: mol_type = other RNA
cctcttcacatggcagccca

SEQ ID NO: 5089 - RNA, 20 nt, synthetic construct
  source 1..20: mol_type = other RNA
cctctttagcttattatgca

SEQ ID NO: 5090 - RNA, 20 nt, synthetic construct
  source 1..20: mol_type = other RNA
cctctttcagcctctttagc

SEQ ID NO: 5091 - RNA, 20 nt, synthetic construct
  source 1..20: mol_type = other RNA
cctgaaataaatccaaaagg

SEQ ID NO: 5092 - RNA, 20 nt, synthetic construct
  source 1..20: mol_type = other RNA
cctgacaatcaactctaata

SEQ ID NO: 5093 - RNA, 20 nt, synthetic construct
  source 1..20: mol_type = other RNA
cctgagagtatttaggcaga

SEQ ID NO: 5094 - RNA, 20 nt, synthetic construct
  source 1..20: mol_type = other RNA
cctgagccacaaggtctaca

SEQ ID NO: 5095 - RNA, 20 nt, synthetic construct
  source 1..20: mol_type = other RNA
cctgagccatcggtgaaact

SEQ ID NO: 5096 - RNA, 20 nt, synthetic construct
  source 1..20: mol_type = other RNA
cctgaggatttaagggatgg

SEQ ID NO: 5097 - RNA, 20 nt, synthetic construct
  source 1..20: mol_type = other RNA
cctgcccctgagccacaagg

SEQ ID NO: 5098 - RNA, 20 nt, synthetic construct
  source 1..20: mol_type = other RNA
cctgctttctggagtgaagt

SEQ ID NO: 5099 - RNA, 20 nt, synthetic construct
  source 1..20: mol_type = other RNA
cctggggatacttagagttc

SEQ ID NO: 5100 - RNA, 20 nt, synthetic construct
  source 1..20: mol_type = other RNA
cctgggggcagtgttcaatc

SEQ ID NO: 5101 - RNA, 20 nt, synthetic construct
  source 1..20: mol_type = other RNA
cctggtagctgctttttcat

SEQ ID NO: 5102 - RNA, 20 nt, synthetic construct
  source 1..20: mol_type = other RNA
cctgtaacaaagaatcataa

SEQ ID NO: 5103 - RNA, 20 nt, synthetic construct
  source 1..20: mol_type = other RNA
cctgtggtctcaaggtccac

SEQ ID NO: 5104 - RNA, 20 nt, synthetic construct
  source 1..20: mol_type = other RNA
ccttaaatcctcaggtcaca

SEQ ID NO: 5105 - RNA, 20 nt, synthetic construct
  source 1..20: mol_type = other RNA
ccttcttatacttcactcca

SEQ ID NO: 5106 - RNA, 20 nt, synthetic construct
  source 1..20: mol_type = other RNA
ccttgagaccacagggttca

SEQ ID NO: 5107 - RNA, 20 nt, synthetic construct
  source 1..20: mol_type = other RNA
ccttgagaggtgagttaaaa

SEQ ID NO: 5108 - RNA, 20 nt, synthetic construct
  source 1..20: mol_type = other RNA
ccttgaggtagcaaggccca

SEQ ID NO: 5109 - RNA, 20 nt, synthetic construct
  source 1..20: mol_type = other RNA
ccttgagttggacttgcctg

SEQ ID NO: 5110 - RNA, 20 nt, synthetic construct
  source 1..20: mol_type = other RNA
ccttgctacctcaaggggga

SEQ ID NO: 5111 - RNA, 20 nt, synthetic construct
  source 1..20: mol_type = other RNA
ccttgtgatcaatgaaactg

SEQ ID NO: 5112 - RNA, 20 nt, synthetic construct
  source 1..20: mol_type = other RNA
ccttgtggctcaggggcagg

SEQ ID NO: 5113 - RNA, 20 nt, synthetic construct
  source 1..20: mol_type = other RNA
ccttgttgaaagctcctttt

SEQ ID NO: 5114 - RNA, 20 nt, synthetic construct
  source 1..20: mol_type = other RNA
ccttttaactcacctctcaa

SEQ ID NO: 5115 - RNA, 20 nt, synthetic construct
  source 1..20: mol_type = other RNA
ccttttcaatctgcctaaat

SEQ ID NO: 5116 - RNA, 20 nt, synthetic construct
  source 1..20: mol_type = other RNA
ccttttccatcccttaaatc

SEQ ID NO: 5117 - RNA, 20 nt, synthetic construct
  source 1..20: mol_type = other RNA
ccttttggatttatttcagg

SEQ ID NO: 5118 - RNA, 20 nt, synthetic construct
  source 1..20: mol_type = other RNA
cgaaaaacgtctgagattcc

SEQ ID NO: 5119 - RNA, 20 nt, synthetic construct
  source 1..20: mol_type = other RNA
cgagaatgttgtattcagtg

SEQ ID NO: 5120 - RNA, 20 nt, synthetic construct
  source 1..20: mol_type = other RNA
cgatggctcaggatatgcat

SEQ ID NO: 5121 - RNA, 20 nt, synthetic construct
  source 1..20: mol_type = other RNA
cgcagcagctacctgggggc

SEQ ID NO: 5122 - RNA, 20 nt, synthetic construct
  source 1..20: mol_type = other RNA
cggaagaacatagaactctg

SEQ ID NO: 5123 - RNA, 20 nt, synthetic construct
  source 1..20: mol_type = other RNA
cggaagtatactttggaata

SEQ ID NO: 5124 - RNA, 20 nt, synthetic construct
  source 1..20: mol_type = other RNA
cggcttatataagctctaag

SEQ ID NO: 5125 - RNA, 20 nt, synthetic construct
  source 1..20: mol_type = other RNA
cgggcccacatctgcccagt

SEQ ID NO: 5126 - RNA, 20 nt, synthetic construct
  source 1..20: mol_type = other RNA
cggggtcaatcttgcaacaa

SEQ ID NO: 5127 - RNA, 20 nt, synthetic construct
  source 1..20: mol_type = other RNA
cggtgaaactaacagataag

SEQ ID NO: 5128 - RNA, 20 nt, synthetic construct
  source 1..20: mol_type = other RNA
cggtgcctgtaacaaagaat

SEQ ID NO: 5129 - RNA, 20 nt, synthetic construct
  source 1..20: mol_type = other RNA
cgtatctgagctctctctgg

SEQ ID NO: 5130 - RNA, 20 nt, synthetic construct
  source 1..20: mol_type = other RNA
cgtcatattcctccatttgt

SEQ ID NO: 5131 - RNA, 20 nt, synthetic construct
  source 1..20: mol_type = other RNA
cgtctgagattcctcaaaat

SEQ ID NO: 5132 - RNA, 20 nt, synthetic construct
  source 1..20: mol_type = other RNA
cgttgacatataaatgatca

SEQ ID NO: 5133 - RNA, 20 nt, synthetic construct
  source 1..20: mol_type = other RNA
cgtttttcggcttatataag

SEQ ID NO: 5134 - RNA, 20 nt, synthetic construct
  source 1..20: mol_type = other RNA
ctaaagagagaatgtagata

SEQ ID NO: 5135 - RNA, 20 nt, synthetic construct
  source 1..20: mol_type = other RNA
ctaaagaggctgaaagaggc

SEQ ID NO: 5136 - RNA, 20 nt, synthetic construct
  source 1..20: mol_type = other RNA
ctaaatactctcaggcacta

SEQ ID NO: 5137 - RNA, 20 nt, synthetic construct
  source 1..20: mol_type = other RNA
ctaaatgcatatcctgagcc

SEQ ID NO: 5138 - RNA, 20 nt, synthetic construct
  source 1..20: mol_type = other RNA
ctaacacagcatgtgtattt

SEQ ID NO: 5139 - RNA, 20 nt, synthetic construct
  source 1..20: mol_type = other RNA
ctaacagataagcaagagag

SEQ ID NO: 5140 - RNA, 20 nt, synthetic construct
  source 1..20: mol_type = other RNA
ctaagagaagcactttggga

SEQ ID NO: 5141 - RNA, 20 nt, synthetic construct
  source 1..20: mol_type = other RNA
ctaagatgagtgtagaacac

SEQ ID NO: 5142 - RNA, 20 nt, synthetic construct
  source 1..20: mol_type = other RNA
ctaagtatccccaggatctg

SEQ ID NO: 5143 - RNA, 20 nt, synthetic construct
  source 1..20: mol_type = other RNA
ctaatagtgcttaaaaatca

SEQ ID NO: 5144 - RNA, 20 nt, synthetic construct
  source 1..20: mol_type = other RNA
ctaatatgtacttcacaata

SEQ ID NO: 5145 - RNA, 20 nt, synthetic construct
  source 1..20: mol_type = other RNA
ctaatgatgttttcctataa

SEQ ID NO: 5146 - RNA, 20 nt, synthetic construct
  source 1..20: mol_type = other RNA
ctaatgtttatgagccagac

SEQ ID NO: 5147 - RNA, 20 nt, synthetic construct
  source 1..20: mol_type = other RNA
ctacaattgcactggaaata

SEQ ID NO: 5148 - RNA, 20 nt, synthetic construct
  source 1..20: mol_type = other RNA
ctacactcatcttagtgcct

SEQ ID NO: 5149 - RNA, 20 nt, synthetic construct
  source 1..20: mol_type = other RNA
ctacagacattttgaaccct

SEQ ID NO: 5150 - RNA, 20 nt, synthetic construct
  source 1..20: mol_type = other RNA
ctacatgaggaactctaagt

SEQ ID NO: 5151 - RNA, 20 nt, synthetic construct
  source 1..20: mol_type = other RNA
ctacattctctctttagtca

SEQ ID NO: 5152 - RNA, 20 nt, synthetic construct
  source 1..20: mol_type = other RNA
ctaccaggtgttctacactc

SEQ ID NO: 5153 - RNA, 20 nt, synthetic construct
  source 1..20: mol_type = other RNA
ctacctcaagggggactgtc

SEQ ID NO: 5154 - RNA, 20 nt, synthetic construct
  source 1..20: mol_type = other RNA
ctacctgggggcagtgttca

SEQ ID NO: 5155 - RNA, 20 nt, synthetic construct
  source 1..20: mol_type = other RNA
ctactaatgatgttttccta

SEQ ID NO: 5156 - RNA, 20 nt, synthetic construct
  source 1..20: mol_type = other RNA
ctactgcactactgggcaga

SEQ ID NO: 5157 - RNA, 20 nt, synthetic construct
  source 1..20: mol_type = other RNA
ctactgggcagatgtgggcc

SEQ ID NO: 5158 - RNA, 20 nt, synthetic construct
  source 1..20: mol_type = other RNA
ctagaggcttgcataataag

SEQ ID NO: 5159 - RNA, 20 nt, synthetic construct
  source 1..20: mol_type = other RNA
ctagtcttccttttccatcc

SEQ ID NO: 5160 - RNA, 20 nt, synthetic construct
  source 1..20: mol_type = other RNA
ctatggaattgtcctgcttt

SEQ ID NO: 5161 - RNA, 20 nt, synthetic construct
  source 1..20: mol_type = other RNA
ctatgttcttccgtcatatt

SEQ ID NO: 5162 - RNA, 20 nt, synthetic construct
  source 1..20: mol_type = other RNA
ctattagagttgattgtcag

SEQ ID NO: 5163 - RNA, 20 nt, synthetic construct
  source 1..20: mol_type = other RNA
ctattccttgttgaaagctc

SEQ ID NO: 5164 - RNA, 20 nt, synthetic construct
  source 1..20: mol_type = other RNA
ctcaaaattgaccagagaga

SEQ ID NO: 5165 - RNA, 20 nt, synthetic construct
  source 1..20: mol_type = other RNA
ctcaaatgcatgtaagaaga

SEQ ID NO: 5166 - RNA, 20 nt, synthetic construct
  source 1..20: mol_type = other RNA
ctcaactcacctaatgttta

SEQ ID NO: 5167 - RNA, 20 nt, synthetic construct
  source 1..20: mol_type = other RNA
ctcaagggggactgtctttc

SEQ ID NO: 5168 - RNA, 20 nt, synthetic construct
  source 1..20: mol_type = other RNA
ctcaaggtccacttggttca

SEQ ID NO: 5169 - RNA, 20 nt, synthetic construct
  source 1..20: mol_type = other RNA
ctcaaggtccatgcctctgg

SEQ ID NO: 5170 - RNA, 20 nt, synthetic construct
  source 1..20: mol_type = other RNA
ctcaaggtgggccttgctac

SEQ ID NO: 5171 - RNA, 20 nt, synthetic construct
  source 1..20: mol_type = other RNA
ctcacctaatgtttatgagc

SEQ ID NO: 5172 - RNA, 20 nt, synthetic construct
  source 1..20: mol_type = other RNA
ctcacctctcaaggtgggcc

SEQ ID NO: 5173 - RNA, 20 nt, synthetic construct
  source 1..20: mol_type = other RNA
ctcactgaatacaacattct

SEQ ID NO: 5174 - RNA, 20 nt, synthetic construct
  source 1..20: mol_type = other RNA
ctcagacgtttttcggctta

SEQ ID NO: 5175 - RNA, 20 nt, synthetic construct
  source 1..20: mol_type = other RNA
ctcagatacgttgacatata

SEQ ID NO: 5176 - RNA, 20 nt, synthetic construct
  source 1..20: mol_type = other RNA
ctcaggatatgcatttagaa

SEQ ID NO: 5177 - RNA, 20 nt, synthetic construct
  source 1..20: mol_type = other RNA
ctcaggcactaagatgagtg

SEQ ID NO: 5178 - RNA, 20 nt, synthetic construct
  source 1..20: mol_type = other RNA
ctcaggggcaggttgttgca

SEQ ID NO: 5179 - RNA, 20 nt, synthetic construct
  source 1..20: mol_type = other RNA
ctcaggtcacaaccatgtat

SEQ ID NO: 5180 - RNA, 20 nt, synthetic construct
  source 1..20: mol_type = other RNA
ctcataaacattaggtgagt

SEQ ID NO: 5181 - RNA, 20 nt, synthetic construct
  source 1..20: mol_type = other RNA
ctcatcatcttcccctccat

SEQ ID NO: 5182 - RNA, 20 nt, synthetic construct
  source 1..20: mol_type = other RNA
ctcatcttagtgcctgagag

SEQ ID NO: 5183 - RNA, 20 nt, synthetic construct
  source 1..20: mol_type = other RNA
ctcatgtagaccttgtggct

SEQ ID NO: 5184 - RNA, 20 nt, synthetic construct
  source 1..20: mol_type = other RNA
ctcatttcattcctaacaca

SEQ ID NO: 5185 - RNA, 20 nt, synthetic construct
  source 1..20: mol_type = other RNA
ctccagaaagcaggacaatt

SEQ ID NO: 5186 - RNA, 20 nt, synthetic construct
  source 1..20: mol_type = other RNA
ctccatcatcaccagatcct

SEQ ID NO: 5187 - RNA, 20 nt, synthetic construct
  source 1..20: mol_type = other RNA
ctccatttgtctggctcata

SEQ ID NO: 5188 - RNA, 20 nt, synthetic construct
  source 1..20: mol_type = other RNA
ctccctcttcacatggcagc

SEQ ID NO: 5189 - RNA, 20 nt, synthetic construct
  source 1..20: mol_type = other RNA
ctcctcaactcacctaatgt

SEQ ID NO: 5190 - RNA, 20 nt, synthetic construct
  source 1..20: mol_type = other RNA
ctccttttggatttatttca

SEQ ID NO: 5191 - RNA, 20 nt, synthetic construct
  source 1..20: mol_type = other RNA
ctcggtgcctgtaacaaaga

SEQ ID NO: 5192 - RNA, 20 nt, synthetic construct
  source 1..20: mol_type = other RNA
ctctaagagaagcactttgg

SEQ ID NO: 5193 - RNA, 20 nt, synthetic construct
  source 1..20: mol_type = other RNA
ctctaagtatccccaggatc

SEQ ID NO: 5194 - RNA, 20 nt, synthetic construct
  source 1..20: mol_type = other RNA
ctctaatagtgcttaaaaat

SEQ ID NO: 5195 - RNA, 20 nt, synthetic construct
  source 1..20: mol_type = other RNA
ctctagtcttccttttccat

SEQ ID NO: 5196 - RNA, 20 nt, synthetic construct
  source 1..20: mol_type = other RNA
ctctcaaggtgggccttgct

SEQ ID NO: 5197 - RNA, 20 nt, synthetic construct
  source 1..20: mol_type = other RNA
ctctcaggcactaagatgag

SEQ ID NO: 5198 - RNA, 20 nt, synthetic construct
  source 1..20: mol_type = other RNA
ctctctctggtcaattttga

SEQ ID NO: 5199 - RNA, 20 nt, synthetic construct
  source 1..20: mol_type = other RNA
ctctctggtcaattttgagg

SEQ ID NO: 5200 - RNA, 20 nt, synthetic construct
  source 1..20: mol_type = other RNA
ctctcttgcttatctgttag

SEQ ID NO: 5201 - RNA, 20 nt, synthetic construct
  source 1..20: mol_type = other RNA
ctctctttagtcatacacac

SEQ ID NO: 5202 - RNA, 20 nt, synthetic construct
  source 1..20: mol_type = other RNA
ctctggaatgggaagacacc

SEQ ID NO: 5203 - RNA, 20 nt, synthetic construct
  source 1..20: mol_type = other RNA
ctctgggctgccatgtgaag

SEQ ID NO: 5204 - RNA, 20 nt, synthetic construct
  source 1..20: mol_type = other RNA
ctctggtcaattttgaggaa

SEQ ID NO: 5205 - RNA, 20 nt, synthetic construct
  source 1..20: mol_type = other RNA
ctcttagagcttatataagc

SEQ ID NO: 5206 - RNA, 20 nt, synthetic construct
  source 1..20: mol_type = other RNA
ctcttcacatggcagcccag

SEQ ID NO: 5207 - RNA, 20 nt, synthetic construct
  source 1..20: mol_type = other RNA
ctcttgcttatctgttagtt

SEQ ID NO: 5208 - RNA, 20 nt, synthetic construct
  source 1..20: mol_type = other RNA
ctctttagcttattatgcaa

SEQ ID NO: 5209 - RNA, 20 nt, synthetic construct
  source 1..20: mol_type = other RNA
ctctttagtcatacacacac

SEQ ID NO: 5210 - RNA, 20 nt, synthetic construct
  source 1..20: mol_type = other RNA
ctctttcagcctctttagct

SEQ ID NO: 5211 - RNA, 20 nt, synthetic construct
  source 1..20: mol_type = other RNA
ctgaaagacagtcccccttg

SEQ ID NO: 5212 - RNA, 20 nt, synthetic construct
  source 1..20: mol_type = other RNA
ctgaaagaggccaatgcccc

SEQ ID NO: 5213 - RNA, 20 nt, synthetic construct
  source 1..20: mol_type = other RNA
ctgaaataaatccaaaagga

SEQ ID NO: 5214 - RNA, 20 nt, synthetic construct
  source 1..20: mol_type = other RNA
ctgaatacaacattctcggt

SEQ ID NO: 5215 - RNA, 20 nt, synthetic construct
  source 1..20: mol_type = other RNA
ctgacaatcaactctaatag

SEQ ID NO: 5216 - RNA, 20 nt, synthetic construct
  source 1..20: mol_type = other RNA
ctgacaatcaatgattttta

SEQ ID NO: 5217 - RNA, 20 nt, synthetic construct
  source 1..20: mol_type = other RNA
ctgagagtatttaggcagat

SEQ ID NO: 5218 - RNA, 20 nt, synthetic construct
  source 1..20: mol_type = other RNA
ctgagattcctcaaaattga

SEQ ID NO: 5219 - RNA, 20 nt, synthetic construct
  source 1..20: mol_type = other RNA
ctgagccacaaggtctacat

SEQ ID NO: 5220 - RNA, 20 nt, synthetic construct
  source 1..20: mol_type = other RNA
ctgagccatcggtgaaacta

SEQ ID NO: 5221 - RNA, 20 nt, synthetic construct
  source 1..20: mol_type = other RNA
ctgagctctctctggtcaat

SEQ ID NO: 5222 - RNA, 20 nt, synthetic construct
  source 1..20: mol_type = other RNA
ctgaggatttaagggatgga

SEQ ID NO: 5223 - RNA, 20 nt, synthetic construct
  source 1..20: mol_type = other RNA
ctgatcatttatatgtcaac

SEQ ID NO: 5224 - RNA, 20 nt, synthetic construct
  source 1..20: mol_type = other RNA
ctgcactactgggcagatgt

SEQ ID NO: 5225 - RNA, 20 nt, synthetic construct
  source 1..20: mol_type = other RNA
ctgccagtggggcattggcc

SEQ ID NO: 5226 - RNA, 20 nt, synthetic construct
  source 1..20: mol_type = other RNA
ctgccatgtgaagagggaga

SEQ ID NO: 5227 - RNA, 20 nt, synthetic construct
  source 1..20: mol_type = other RNA
ctgcccagtagtgcagtagc

SEQ ID NO: 5228 - RNA, 20 nt, synthetic construct
  source 1..20: mol_type = other RNA
ctgcccccaggtagctgctg

SEQ ID NO: 5229 - RNA, 20 nt, synthetic construct
  source 1..20: mol_type = other RNA
ctgcccctgagccacaaggt

SEQ ID NO: 5230 - RNA, 20 nt, synthetic construct
  source 1..20: mol_type = other RNA
ctgcctaaatactctcaggc

SEQ ID NO: 5231 - RNA, 20 nt, synthetic construct
  source 1..20: mol_type = other RNA
ctgcgggcccacatctgccc

SEQ ID NO: 5232 - RNA, 20 nt, synthetic construct
  source 1..20: mol_type = other RNA
ctgctgcgggcccacatctg

SEQ ID NO: 5233 - RNA, 20 nt, synthetic construct
  source 1..20: mol_type = other RNA
ctgctttctggagtgaagta

SEQ ID NO: 5234 - RNA, 20 nt, synthetic construct
  source 1..20: mol_type = other RNA
ctgctttttcatgcttctcc

SEQ ID NO: 5235 - RNA, 20 nt, synthetic construct
  source 1..20: mol_type = other RNA
ctggaaatacacatgctgtg

SEQ ID NO: 5236 - RNA, 20 nt, synthetic construct
  source 1..20: mol_type = other RNA
ctggaatgggaagacaccta

SEQ ID NO: 5237 - RNA, 20 nt, synthetic construct
  source 1..20: mol_type = other RNA
ctggagtgaagtataagaag

SEQ ID NO: 5238 - RNA, 20 nt, synthetic construct
  source 1..20: mol_type = other RNA
ctggcagcatcttcacttct

SEQ ID NO: 5239 - RNA, 20 nt, synthetic construct
  source 1..20: mol_type = other RNA
ctggctcataaacattaggt

SEQ ID NO: 5240 - RNA, 20 nt, synthetic construct
  source 1..20: mol_type = other RNA
ctgggcagatgtgggcccgc

SEQ ID NO: 5241 - RNA, 20 nt, synthetic construct
  source 1..20: mol_type = other RNA
ctgggctgccatgtgaagag

SEQ ID NO: 5242 - RNA, 20 nt, synthetic construct
  source 1..20: mol_type = other RNA
ctgggctgtactttgtatat

SEQ ID NO: 5243 - RNA, 20 nt, synthetic construct
  source 1..20: mol_type = other RNA
ctggggatacttagagttcc

SEQ ID NO: 5244 - RNA, 20 nt, synthetic construct
  source 1..20: mol_type = other RNA
ctgggggcagtgttcaatct

SEQ ID NO: 5245 - RNA, 20 nt, synthetic construct
  source 1..20: mol_type = other RNA
ctggtaagattgaacactgc

SEQ ID NO: 5246 - RNA, 20 nt, synthetic construct
  source 1..20: mol_type = other RNA
ctggtagctgctttttcatg

SEQ ID NO: 5247 - RNA, 20 nt, synthetic construct
  source 1..20: mol_type = other RNA
ctggtcaattttgaggaatc

SEQ ID NO: 5248 - RNA, 20 nt, synthetic construct
  source 1..20: mol_type = other RNA
ctggtgatgatggaggggaa

SEQ ID NO: 5249 - RNA, 20 nt, synthetic construct
  source 1..20: mol_type = other RNA
ctgtaacaaagaatcataat

SEQ ID NO: 5250 - RNA, 20 nt, synthetic construct
  source 1..20: mol_type = other RNA
ctgtactttgtatattccaa

SEQ ID NO: 5251 - RNA, 20 nt, synthetic construct
  source 1..20: mol_type = other RNA
ctgtagctcctcaactcacc

SEQ ID NO: 5252 - RNA, 20 nt, synthetic construct
  source 1..20: mol_type = other RNA
ctgtctttcagatacatggt

SEQ ID NO: 5253 - RNA, 20 nt, synthetic construct
  source 1..20: mol_type = other RNA
ctgtggtctcaaggtccact

SEQ ID NO: 5254 - RNA, 20 nt, synthetic construct
  source 1..20: mol_type = other RNA
ctgtgttaggaatgaaatga

SEQ ID NO: 5255 - RNA, 20 nt, synthetic construct
  source 1..20: mol_type = other RNA
ctgttagtttcaccgatggc

SEQ ID NO: 5256 - RNA, 20 nt, synthetic construct
  source 1..20: mol_type = other RNA
cttaaaaatcattgattgtc

SEQ ID NO: 5257 - RNA, 20 nt, synthetic construct
  source 1..20: mol_type = other RNA
cttaaatcctcaggtcacaa

SEQ ID NO: 5258 - RNA, 20 nt, synthetic construct
  source 1..20: mol_type = other RNA
cttacatgcatttgaggtca

SEQ ID NO: 5259 - RNA, 20 nt, synthetic construct
  source 1..20: mol_type = other RNA
cttaccagtgctgatcattt

SEQ ID NO: 5260 - RNA, 20 nt, synthetic construct
  source 1..20: mol_type = other RNA
cttacttgacctcaaatgca

SEQ ID NO: 5261 - RNA, 20 nt, synthetic construct
  source 1..20: mol_type = other RNA
cttagagcttatataagccg

SEQ ID NO: 5262 - RNA, 20 nt, synthetic construct
  source 1..20: mol_type = other RNA
cttagagttcctcatgtaga

SEQ ID NO: 5263 - RNA, 20 nt, synthetic construct
  source 1..20: mol_type = other RNA
cttagtgcctgagagtattt

SEQ ID NO: 5264 - RNA, 20 nt, synthetic construct
  source 1..20: mol_type = other RNA
cttatacttcactccagaaa

SEQ ID NO: 5265 - RNA, 20 nt, synthetic construct
  source 1..20: mol_type = other RNA
cttatataagccgaaaaacg

SEQ ID NO: 5266 - RNA, 20 nt, synthetic construct
  source 1..20: mol_type = other RNA
cttatataagctctaagaga

SEQ ID NO: 5267 - RNA, 20 nt, synthetic construct
  source 1..20: mol_type = other RNA
cttatctgttagtttcaccg

SEQ ID NO: 5268 - RNA, 20 nt, synthetic construct
  source 1..20: mol_type = other RNA
cttattatgcaagcctctag

SEQ ID NO: 5269 - RNA, 20 nt, synthetic construct
  source 1..20: mol_type = other RNA
cttcacaatatctacattct

SEQ ID NO: 5270 - RNA, 20 nt, synthetic construct
  source 1..20: mol_type = other RNA
cttcacatggcagcccagag

SEQ ID NO: 5271 - RNA, 20 nt, synthetic construct
  source 1..20: mol_type = other RNA
cttcactccagaaagcagga

SEQ ID NO: 5272 - RNA, 20 nt, synthetic construct
  source 1..20: mol_type = other RNA
cttcacttctaaatgcatat

SEQ ID NO: 5273 - RNA, 20 nt, synthetic construct
  source 1..20: mol_type = other RNA
cttcccattccagaggcatg

SEQ ID NO: 5274 - RNA, 20 nt, synthetic construct
  source 1..20: mol_type = other RNA
cttcccctccatcatcacca

SEQ ID NO: 5275 - RNA, 20 nt, synthetic construct
  source 1..20: mol_type = other RNA
cttccggggtcaatcttgca

SEQ ID NO: 5276 - RNA, 20 nt, synthetic construct
  source 1..20: mol_type = other RNA
cttccgtcatattcctccat

SEQ ID NO: 5277 - RNA, 20 nt, synthetic construct
  source 1..20: mol_type = other RNA
cttcctgacaatcaactcta

SEQ ID NO: 5278 - RNA, 20 nt, synthetic construct
  source 1..20: mol_type = other RNA
cttccttttccatcccttaa

SEQ ID NO: 5279 - RNA, 20 nt, synthetic construct
  source 1..20: mol_type = other RNA
cttctaaatgcatatcctga

SEQ ID NO: 5280 - RNA, 20 nt, synthetic construct
  source 1..20: mol_type = other RNA
cttctccctcttcacatggc

SEQ ID NO: 5281 - RNA, 20 nt, synthetic construct
  source 1..20: mol_type = other RNA
cttctcttagagcttatata

SEQ ID NO: 5282 - RNA, 20 nt, synthetic construct
  source 1..20: mol_type = other RNA
cttcttacatgcatttgagg

SEQ ID NO: 5283 - RNA, 20 nt, synthetic construct
  source 1..20: mol_type = other RNA
cttcttacttgacctcaaat

SEQ ID NO: 5284 - RNA, 20 nt, synthetic construct
  source 1..20: mol_type = other RNA
cttcttatacttcactccag

SEQ ID NO: 5285 - RNA, 20 nt, synthetic construct
  source 1..20: mol_type = other RNA
cttgaccaaatgcaacccat

SEQ ID NO: 5286 - RNA, 20 nt, synthetic construct
  source 1..20: mol_type = other RNA
cttgacctcaaatgcatgta

SEQ ID NO: 5287 - RNA, 20 nt, synthetic construct
  source 1..20: mol_type = other RNA
cttgagaccacagggttcaa

SEQ ID NO: 5288 - RNA, 20 nt, synthetic construct
  source 1..20: mol_type = other RNA
cttgagaggtgagttaaaag

SEQ ID NO: 5289 - RNA, 20 nt, synthetic construct
  source 1..20: mol_type = other RNA
cttgaggtagcaaggcccac

SEQ ID NO: 5290 - RNA, 20 nt, synthetic construct
  source 1..20: mol_type = other RNA
cttgagttggacttgcctga

SEQ ID NO: 5291 - RNA, 20 nt, synthetic construct
  source 1..20: mol_type = other RNA
cttgcaacaacctgcccctg

SEQ ID NO: 5292 - RNA, 20 nt, synthetic construct
  source 1..20: mol_type = other RNA
cttgcataataagctaaaga

SEQ ID NO: 5293 - RNA, 20 nt, synthetic construct
  source 1..20: mol_type = other RNA
cttgcctgaaataaatccaa

SEQ ID NO: 5294 - RNA, 20 nt, synthetic construct
  source 1..20: mol_type = other RNA
cttgctacctcaagggggac

SEQ ID NO: 5295 - RNA, 20 nt, synthetic construct
  source 1..20: mol_type = other RNA
cttgcttatctgttagtttc

SEQ ID NO: 5296 - RNA, 20 nt, synthetic construct
  source 1..20: mol_type = other RNA
cttggttcatgtcttcttac

SEQ ID NO: 5297 - RNA, 20 nt, synthetic construct
  source 1..20: mol_type = other RNA
cttgtgatcaatgaaactgg

SEQ ID NO: 5298 - RNA, 20 nt, synthetic construct
  source 1..20: mol_type = other RNA
cttgtggctcaggggcaggt

SEQ ID NO: 5299 - RNA, 20 nt, synthetic construct
  source 1..20: mol_type = other RNA
cttgttgaaagctccttttg

SEQ ID NO: 5300 - RNA, 20 nt, synthetic construct
  source 1..20: mol_type = other RNA
ctttagcttattatgcaagc

SEQ ID NO: 5301 - RNA, 20 nt, synthetic construct
  source 1..20: mol_type = other RNA
ctttagtcatacacacacac

SEQ ID NO: 5302 - RNA, 20 nt, synthetic construct
  source 1..20: mol_type = other RNA
ctttcagatacatggttgtg

SEQ ID NO: 5303 - RNA, 20 nt, synthetic construct
  source 1..20: mol_type = other RNA
ctttcagcctctttagctta

SEQ ID NO: 5304 - RNA, 20 nt, synthetic construct
  source 1..20: mol_type = other RNA
ctttccattatgattctttg

SEQ ID NO: 5305 - RNA, 20 nt, synthetic construct
  source 1..20: mol_type = other RNA
ctttctggagtgaagtataa

SEQ ID NO: 5306 - RNA, 20 nt, synthetic construct
  source 1..20: mol_type = other RNA
ctttggaatatacaaagtac

SEQ ID NO: 5307 - RNA, 20 nt, synthetic construct
  source 1..20: mol_type = other RNA
ctttgggattctttccatta

SEQ ID NO: 5308 - RNA, 20 nt, synthetic construct
  source 1..20: mol_type = other RNA
ctttgtatattccaaagtat

SEQ ID NO: 5309 - RNA, 20 nt, synthetic construct
  source 1..20: mol_type = other RNA
ctttgttacaggcaccgaga

SEQ ID NO: 5310 - RNA, 20 nt, synthetic construct
  source 1..20: mol_type = other RNA
cttttaactcacctctcaag

SEQ ID NO: 5311 - RNA, 20 nt, synthetic construct
  source 1..20: mol_type = other RNA
cttttcaatctgcctaaata

SEQ ID NO: 5312 - RNA, 20 nt, synthetic construct
  source 1..20: mol_type = other RNA
cttttccatcccttaaatcc

SEQ ID NO: 5313 - RNA, 20 nt, synthetic construct
  source 1..20: mol_type = other RNA
cttttggatttatttcaggc

SEQ ID NO: 5314 - RNA, 20 nt, synthetic construct
  source 1..20: mol_type = other RNA
ctttttcatgcttctccctc

SEQ ID NO: 5315 - RNA, 20 nt, synthetic construct
  source 1..20: mol_type = other RNA
gaaaaacgtctgagattcct

SEQ ID NO: 5316 - RNA, 20 nt, synthetic construct
  source 1..20: mol_type = other RNA
gaaaaagcagctaccaggtg

SEQ ID NO: 5317 - RNA, 20 nt, synthetic construct
  source 1..20: mol_type = other RNA
gaaaacatcattagtagctg

SEQ ID NO: 5318 - RNA, 20 nt, synthetic construct
  source 1..20: mol_type = other RNA
gaaaaggaagactagaggct

SEQ ID NO: 5319 - RNA, 20 nt, synthetic construct
  source 1..20: mol_type = other RNA
gaaaaggacaccttttaact

SEQ ID NO: 5320 - RNA, 20 nt, synthetic construct
  source 1..20: mol_type = other RNA
gaaaatatgggttgcatttg

SEQ ID NO: 5321 - RNA, 20 nt, synthetic construct
  source 1..20: mol_type = other RNA
gaaactaacagataagcaag

SEQ ID NO: 5322 - RNA, 20 nt, synthetic construct
  source 1..20: mol_type = other RNA
gaaactgggctgtactttgt

SEQ ID NO: 5323 - RNA, 20 nt, synthetic construct
  source 1..20: mol_type = other RNA
gaaagaatcccaaagtgctt

SEQ ID NO: 5324 - RNA, 20 nt, synthetic construct
  source 1..20: mol_type = other RNA
gaaagacagtcccccttgag

SEQ ID NO: 5325 - RNA, 20 nt, synthetic construct
  source 1..20: mol_type = other RNA
gaaagaggccaatgccccac

SEQ ID NO: 5326 - RNA, 20 nt, synthetic construct
  source 1..20: mol_type = other RNA
gaaagcaggacaattccata

SEQ ID NO: 5327 - RNA, 20 nt, synthetic construct
  source 1..20: mol_type = other RNA
gaaagctccttttggattta

SEQ ID NO: 5328 - RNA, 20 nt, synthetic construct
  source 1..20: mol_type = other RNA
gaaataaatccaaaaggagc

SEQ ID NO: 5329 - RNA, 20 nt, synthetic construct
  source 1..20: mol_type = other RNA
gaaatacacatgctgtgtta

SEQ ID NO: 5330 - RNA, 20 nt, synthetic construct
  source 1..20: mol_type = other RNA
gaaatgagtccccaaaacat

SEQ ID NO: 5331 - RNA, 20 nt, synthetic construct
  source 1..20: mol_type = other RNA
gaacacctggtagctgcttt

SEQ ID NO: 5332 - RNA, 20 nt, synthetic construct
  source 1..20: mol_type = other RNA
gaacactgcccccaggtagc

SEQ ID NO: 5333 - RNA, 20 nt, synthetic construct
  source 1..20: mol_type = other RNA
gaacatagaactctgggctg

SEQ ID NO: 5334 - RNA, 20 nt, synthetic construct
  source 1..20: mol_type = other RNA
gaaccaagtggaccttgaga

SEQ ID NO: 5335 - RNA, 20 nt, synthetic construct
  source 1..20: mol_type = other RNA
gaaccctgtggtctcaaggt

SEQ ID NO: 5336 - RNA, 20 nt, synthetic construct
  source 1..20: mol_type = other RNA
gaactctaagtatccccagg

SEQ ID NO: 5337 - RNA, 20 nt, synthetic construct
  source 1..20: mol_type = other RNA
gaactctgggctgccatgtg

SEQ ID NO: 5338 - RNA, 20 nt, synthetic construct
  source 1..20: mol_type = other RNA
gaagaacatagaactctggg

SEQ ID NO: 5339 - RNA, 20 nt, synthetic construct
  source 1..20: mol_type = other RNA
gaagacacctatggaattgt

SEQ ID NO: 5340 - RNA, 20 nt, synthetic construct
  source 1..20: mol_type = other RNA
gaagacatgaaccaagtgga

SEQ ID NO: 5341 - RNA, 20 nt, synthetic construct
  source 1..20: mol_type = other RNA
gaagaccctcactgaataca

SEQ ID NO: 5342 - RNA, 20 nt, synthetic construct
  source 1..20: mol_type = other RNA
gaagactagaggcttgcata

SEQ ID NO: 5343 - RNA, 20 nt, synthetic construct
  source 1..20: mol_type = other RNA
gaagagggagaagcatgaaa

SEQ ID NO: 5344 - RNA, 20 nt, synthetic construct
  source 1..20: mol_type = other RNA
gaagatgatgagctactgca

SEQ ID NO: 5345 - RNA, 20 nt, synthetic construct
  source 1..20: mol_type = other RNA
gaagatgctgccagtggggc

SEQ ID NO: 5346 - RNA, 20 nt, synthetic construct
  source 1..20: mol_type = other RNA
gaagcactttgggattcttt

SEQ ID NO: 5347 - RNA, 20 nt, synthetic construct
  source 1..20: mol_type = other RNA
gaagcatgaaaaagcagcta

SEQ ID NO: 5348 - RNA, 20 nt, synthetic construct
  source 1..20: mol_type = other RNA
gaagcattcaaaatcttgac

SEQ ID NO: 5349 - RNA, 20 nt, synthetic construct
  source 1..20: mol_type = other RNA
gaagggtggccttgtgatca

SEQ ID NO: 5350 - RNA, 20 nt, synthetic construct
  source 1..20: mol_type = other RNA
gaagtacatattaggaaaat

SEQ ID NO: 5351 - RNA, 20 nt, synthetic construct
  source 1..20: mol_type = other RNA
gaagtataagaagggtggcc

SEQ ID NO: 5352 - RNA, 20 nt, synthetic construct
  source 1..20: mol_type = other RNA
gaagtatactttggaatata

SEQ ID NO: 5353 - RNA, 20 nt, synthetic construct
  source 1..20: mol_type = other RNA
gaagtgaagatgctgccagt

SEQ ID NO: 5354 - RNA, 20 nt, synthetic construct
  source 1..20: mol_type = other RNA
gaatacaacattctcggtgc

SEQ ID NO: 5355 - RNA, 20 nt, synthetic construct
  source 1..20: mol_type = other RNA
gaatatacaaagtacagccc

SEQ ID NO: 5356 - RNA, 20 nt, synthetic construct
  source 1..20: mol_type = other RNA
gaatatgacggaagaacata

SEQ ID NO: 5357 - RNA, 20 nt, synthetic construct
  source 1..20: mol_type = other RNA
gaatcataatggaaagaatc

SEQ ID NO: 5358 - RNA, 20 nt, synthetic construct
  source 1..20: mol_type = other RNA
gaatcccaaagtgcttctct

SEQ ID NO: 5359 - RNA, 20 nt, synthetic construct
  source 1..20: mol_type = other RNA
gaatctcagacgtttttcgg

SEQ ID NO: 5360 - RNA, 20 nt, synthetic construct
  source 1..20: mol_type = other RNA
gaatgaaatgagtccccaaa

SEQ ID NO: 5361 - RNA, 20 nt, synthetic construct
  source 1..20: mol_type = other RNA
gaatgcttcctgacaatcaa

SEQ ID NO: 5362 - RNA, 20 nt, synthetic construct
  source 1..20: mol_type = other RNA
gaatgggaagacacctatgg

SEQ ID NO: 5363 - RNA, 20 nt, synthetic construct
  source 1..20: mol_type = other RNA
gaatgtagatattgtgaagt

SEQ ID NO: 5364 - RNA, 20 nt, synthetic construct
  source 1..20: mol_type = other RNA
gaatgttgtattcagtgagg

SEQ ID NO: 5365 - RNA, 20 nt, synthetic construct
  source 1..20: mol_type = other RNA
gaattgtcctgctttctgga

SEQ ID NO: 5366 - RNA, 20 nt, synthetic construct
  source 1..20: mol_type = other RNA
gacaaatggaggaatatgac

SEQ ID NO: 5367 - RNA, 20 nt, synthetic construct
  source 1..20: mol_type = other RNA
gacaatcaactctaatagtg

SEQ ID NO: 5368 - RNA, 20 nt, synthetic construct
  source 1..20: mol_type = other RNA
gacaatcaatgatttttaag

SEQ ID NO: 5369 - RNA, 20 nt, synthetic construct
  source 1..20: mol_type = other RNA
gacaattccataggtgtctt

SEQ ID NO: 5370 - RNA, 20 nt, synthetic construct
  source 1..20: mol_type = other RNA
gacacctatggaattgtcct

SEQ ID NO: 5371 - RNA, 20 nt, synthetic construct
  source 1..20: mol_type = other RNA
gacaccttttaactcacctc

SEQ ID NO: 5372 - RNA, 20 nt, synthetic construct
  source 1..20: mol_type = other RNA
gacagtcccccttgaggtag

SEQ ID NO: 5373 - RNA, 20 nt, synthetic construct
  source 1..20: mol_type = other RNA
gacatataaatgatcagcac

SEQ ID NO: 5374 - RNA, 20 nt, synthetic construct
  source 1..20: mol_type = other RNA
gacatgaaccaagtggacct

SEQ ID NO: 5375 - RNA, 20 nt, synthetic construct
  source 1..20: mol_type = other RNA
gacattttgaaccctgtggt

SEQ ID NO: 5376 - RNA, 20 nt, synthetic construct
  source 1..20: mol_type = other RNA
gaccaaatgcaacccatatt

SEQ ID NO: 5377 - RNA, 20 nt, synthetic construct
  source 1..20: mol_type = other RNA
gaccacagggttcaaaatgt

SEQ ID NO: 5378 - RNA, 20 nt, synthetic construct
  source 1..20: mol_type = other RNA
gaccagagagagctcagata

SEQ ID NO: 5379 - RNA, 20 nt, synthetic construct
  source 1..20: mol_type = other RNA
gaccccggaagtatactttg

SEQ ID NO: 5380 - RNA, 20 nt, synthetic construct
  source 1..20: mol_type = other RNA
gaccctcactgaatacaaca

SEQ ID NO: 5381 - RNA, 20 nt, synthetic construct
  source 1..20: mol_type = other RNA
gacctcaaatgcatgtaaga

SEQ ID NO: 5382 - RNA, 20 nt, synthetic construct
  source 1..20: mol_type = other RNA
gacctgaggatttaagggat

SEQ ID NO: 5383 - RNA, 20 nt, synthetic construct
  source 1..20: mol_type = other RNA
gaccttgagaccacagggtt

SEQ ID NO: 5384 - RNA, 20 nt, synthetic construct
  source 1..20: mol_type = other RNA
gaccttgagttggacttgcc

SEQ ID NO: 5385 - RNA, 20 nt, synthetic construct
  source 1..20: mol_type = other RNA
gaccttgtggctcaggggca

SEQ ID NO: 5386 - RNA, 20 nt, synthetic construct
  source 1..20: mol_type = other RNA
gacggaagaacatagaactc

SEQ ID NO: 5387 - RNA, 20 nt, synthetic construct
  source 1..20: mol_type = other RNA
gacgtttttcggcttatata

SEQ ID NO: 5388 - RNA, 20 nt, synthetic construct
  source 1..20: mol_type = other RNA
gactaaagagagaatgtaga

SEQ ID NO: 5389 - RNA, 20 nt, synthetic construct
  source 1..20: mol_type = other RNA
gactagaggcttgcataata

SEQ ID NO: 5390 - RNA, 20 nt, synthetic construct
  source 1..20: mol_type = other RNA
gactattccttgttgaaagc

SEQ ID NO: 5391 - RNA, 20 nt, synthetic construct
  source 1..20: mol_type = other RNA
gactcatttcattcctaaca

SEQ ID NO: 5392 - RNA, 20 nt, synthetic construct
  source 1..20: mol_type = other RNA
gactgtctttcagatacatg

SEQ ID NO: 5393 - RNA, 20 nt, synthetic construct
  source 1..20: mol_type = other RNA
gacttgcctgaaataaatcc

SEQ ID NO: 5394 - RNA, 20 nt, synthetic construct
  source 1..20: mol_type = other RNA
gagaagcactttgggattct

SEQ ID NO: 5395 - RNA, 20 nt, synthetic construct
  source 1..20: mol_type = other RNA
gagaagcatgaaaaagcagc

SEQ ID NO: 5396 - RNA, 20 nt, synthetic construct
  source 1..20: mol_type = other RNA
gagaatgtagatattgtgaa

SEQ ID NO: 5397 - RNA, 20 nt, synthetic construct
  source 1..20: mol_type = other RNA
gagaatgttgtattcagtga

SEQ ID NO: 5398 - RNA, 20 nt, synthetic construct
  source 1..20: mol_type = other RNA
gagaccacagggttcaaaat

SEQ ID NO: 5399 - RNA, 20 nt, synthetic construct
  source 1..20: mol_type = other RNA
gagagaatgtagatattgtg

SEQ ID NO: 5400 - RNA, 20 nt, synthetic construct
  source 1..20: mol_type = other RNA
gagagagctcagatacgttg

SEQ ID NO: 5401 - RNA, 20 nt, synthetic construct
  source 1..20: mol_type = other RNA
gagagatgttttggggactc

SEQ ID NO: 5402 - RNA, 20 nt, synthetic construct
  source 1..20: mol_type = other RNA
gagagctcagatacgttgac

SEQ ID NO: 5403 - RNA, 20 nt, synthetic construct
  source 1..20: mol_type = other RNA
gagaggtgagttaaaaggtg

SEQ ID NO: 5404 - RNA, 20 nt, synthetic construct
  source 1..20: mol_type = other RNA
gagagtatttaggcagattg

SEQ ID NO: 5405 - RNA, 20 nt, synthetic construct
  source 1..20: mol_type = other RNA
gagatgttttggggactcat

SEQ ID NO: 5406 - RNA, 20 nt, synthetic construct
  source 1..20: mol_type = other RNA
gagattcctcaaaattgacc

SEQ ID NO: 5407 - RNA, 20 nt, synthetic construct
  source 1..20: mol_type = other RNA
gagccacaaggtctacatga

SEQ ID NO: 5408 - RNA, 20 nt, synthetic construct
  source 1..20: mol_type = other RNA
gagccagacaaatggaggaa

SEQ ID NO: 5409 - RNA, 20 nt, synthetic construct
  source 1..20: mol_type = other RNA
gagccatcggtgaaactaac

SEQ ID NO: 5410 - RNA, 20 nt, synthetic construct
  source 1..20: mol_type = other RNA
gagctacagacattttgaac

SEQ ID NO: 5411 - RNA, 20 nt, synthetic construct
  source 1..20: mol_type = other RNA
gagctactgcactactgggc

SEQ ID NO: 5412 - RNA, 20 nt, synthetic construct
  source 1..20: mol_type = other RNA
gagctcagatacgttgacat

SEQ ID NO: 5413 - RNA, 20 nt, synthetic construct
  source 1..20: mol_type = other RNA
gagctctctctggtcaattt

SEQ ID NO: 5414 - RNA, 20 nt, synthetic construct
  source 1..20: mol_type = other RNA
gagcttatataagccgaaaa

SEQ ID NO: 5415 - RNA, 20 nt, synthetic construct
  source 1..20: mol_type = other RNA
gagctttcaacaaggaatag

SEQ ID NO: 5416 - RNA, 20 nt, synthetic construct
  source 1..20: mol_type = other RNA
gaggaactctaagtatcccc

SEQ ID NO: 5417 - RNA, 20 nt, synthetic construct
  source 1..20: mol_type = other RNA
gaggaatatgacggaagaac

SEQ ID NO: 5418 - RNA, 20 nt, synthetic construct
  source 1..20: mol_type = other RNA
gaggaatctcagacgttttt

SEQ ID NO: 5419 - RNA, 20 nt, synthetic construct
  source 1..20: mol_type = other RNA
gaggagctacagacattttg

SEQ ID NO: 5420 - RNA, 20 nt, synthetic construct
  source 1..20: mol_type = other RNA
gaggatttaagggatggaaa

SEQ ID NO: 5421 - RNA, 20 nt, synthetic construct
  source 1..20: mol_type = other RNA
gaggcatggaccttgagttg

SEQ ID NO: 5422 - RNA, 20 nt, synthetic construct
  source 1..20: mol_type = other RNA
gaggccaatgccccactggc

SEQ ID NO: 5423 - RNA, 20 nt, synthetic construct
  source 1..20: mol_type = other RNA
gaggctgaaagaggccaatg

SEQ ID NO: 5424 - RNA, 20 nt, synthetic construct
  source 1..20: mol_type = other RNA
gaggcttgcataataagcta

SEQ ID NO: 5425 - RNA, 20 nt, synthetic construct
  source 1..20: mol_type = other RNA
gagggagaagcatgaaaaag

SEQ ID NO: 5426 - RNA, 20 nt, synthetic construct
  source 1..20: mol_type = other RNA
gaggggaagatgatgagcta

SEQ ID NO: 5427 - RNA, 20 nt, synthetic construct
  source 1..20: mol_type = other RNA
gagggtcttcttacatgcat

SEQ ID NO: 5428 - RNA, 20 nt, synthetic construct
  source 1..20: mol_type = other RNA
gaggtagcaaggcccacctt

SEQ ID NO: 5429 - RNA, 20 nt, synthetic construct
  source 1..20: mol_type = other RNA
gaggtcaagtaagaagacat

SEQ ID NO: 5430 - RNA, 20 nt, synthetic construct
  source 1..20: mol_type = other RNA
gaggtgagttaaaaggtgtc

SEQ ID NO: 5431 - RNA, 20 nt, synthetic construct
  source 1..20: mol_type = other RNA
gagtatttaggcagattgaa

SEQ ID NO: 5432 - RNA, 20 nt, synthetic construct
  source 1..20: mol_type = other RNA
gagtccccaaaacatctctc

SEQ ID NO: 5433 - RNA, 20 nt, synthetic construct
  source 1..20: mol_type = other RNA
gagtgaagtataagaagggt

SEQ ID NO: 5434 - RNA, 20 nt, synthetic construct
  source 1..20: mol_type = other RNA
gagtgtagaacacctggtag

SEQ ID NO: 5435 - RNA, 20 nt, synthetic construct
  source 1..20: mol_type = other RNA
gagttaaaaggtgtcctttt

SEQ ID NO: 5436 - RNA, 20 nt, synthetic construct
  source 1..20: mol_type = other RNA
gagttcctcatgtagacctt

SEQ ID NO: 5437 - RNA, 20 nt, synthetic construct
  source 1..20: mol_type = other RNA
gagttctatgttcttccgtc

SEQ ID NO: 5438 - RNA, 20 nt, synthetic construct
  source 1..20: mol_type = other RNA
gagttgaggagctacagaca

SEQ ID NO: 5439 - RNA, 20 nt, synthetic construct
  source 1..20: mol_type = other RNA
gagttgattgtcaggaagca

SEQ ID NO: 5440 - RNA, 20 nt, synthetic construct
  source 1..20: mol_type = other RNA
gagttggacttgcctgaaat

SEQ ID NO: 5441 - RNA, 20 nt, synthetic construct
  source 1..20: mol_type = other RNA
gataagcaagagagatgttt

SEQ ID NO: 5442 - RNA, 20 nt, synthetic construct
  source 1..20: mol_type = other RNA
gatacatggttgtgacctga

SEQ ID NO: 5443 - RNA, 20 nt, synthetic construct
  source 1..20: mol_type = other RNA
gatacgttgacatataaatg

SEQ ID NO: 5444 - RNA, 20 nt, synthetic construct
  source 1..20: mol_type = other RNA
gatacttagagttcctcatg

SEQ ID NO: 5445 - RNA, 20 nt, synthetic construct
  source 1..20: mol_type = other RNA
gatatgcatttagaagtgaa

SEQ ID NO: 5446 - RNA, 20 nt, synthetic construct
  source 1..20: mol_type = other RNA
gatattgtgaagtacatatt

SEQ ID NO: 5447 - RNA, 20 nt, synthetic construct
  source 1..20: mol_type = other RNA
gatcaatgaaactgggctgt

SEQ ID NO: 5448 - RNA, 20 nt, synthetic construct
  source 1..20: mol_type = other RNA
gatcacaaggccacccttct

SEQ ID NO: 5449 - RNA, 20 nt, synthetic construct
  source 1..20: mol_type = other RNA
gatcagcactggtaagattg

SEQ ID NO: 5450 - RNA, 20 nt, synthetic construct
  source 1..20: mol_type = other RNA
gatcatttatatgtcaacgt

SEQ ID NO: 5451 - RNA, 20 nt, synthetic construct
  source 1..20: mol_type = other RNA
gatcctggggatacttagag

SEQ ID NO: 5452 - RNA, 20 nt, synthetic construct
  source 1..20: mol_type = other RNA
gatctggtgatgatggaggg

SEQ ID NO: 5453 - RNA, 20 nt, synthetic construct
  source 1..20: mol_type = other RNA
gatgagctactgcactactg

SEQ ID NO: 5454 - RNA, 20 nt, synthetic construct
  source 1..20: mol_type = other RNA
gatgagtgtagaacacctgg

SEQ ID NO: 5455 - RNA, 20 nt, synthetic construct
  source 1..20: mol_type = other RNA
gatgatgagctactgcacta

SEQ ID NO: 5456 - RNA, 20 nt, synthetic construct
  source 1..20: mol_type = other RNA
gatgatggaggggaagatga

SEQ ID NO: 5457 - RNA, 20 nt, synthetic construct
  source 1..20: mol_type = other RNA
gatgctgccagtggggcatt

SEQ ID NO: 5458 - RNA, 20 nt, synthetic construct
  source 1..20: mol_type = other RNA
gatggaaaaggaagactaga

SEQ ID NO: 5459 - RNA, 20 nt, synthetic construct
  source 1..20: mol_type = other RNA
gatggaggggaagatgatga

SEQ ID NO: 5460 - RNA, 20 nt, synthetic construct
  source 1..20: mol_type = other RNA
gatggctcaggatatgcatt

SEQ ID NO: 5461 - RNA, 20 nt, synthetic construct
  source 1..20: mol_type = other RNA
gatgtgcatttttgtgaaat

SEQ ID NO: 5462 - RNA, 20 nt, synthetic construct
  source 1..20: mol_type = other RNA
gatgtgggcccgcagcagct

SEQ ID NO: 5463 - RNA, 20 nt, synthetic construct
  source 1..20: mol_type = other RNA
gatgttttggggactcattt

SEQ ID NO: 5464 - RNA, 20 nt, synthetic construct
  source 1..20: mol_type = other RNA
gattcctcaaaattgaccag

SEQ ID NO: 5465 - RNA, 20 nt, synthetic construct
  source 1..20: mol_type = other RNA
gattctttccattatgattc

SEQ ID NO: 5466 - RNA, 20 nt, synthetic construct
  source 1..20: mol_type = other RNA
gattctttgttacaggcacc

SEQ ID NO: 5467 - RNA, 20 nt, synthetic construct
  source 1..20: mol_type = other RNA
gattgaaaaggacacctttt

SEQ ID NO: 5468 - RNA, 20 nt, synthetic construct
  source 1..20: mol_type = other RNA
gattgaacactgcccccagg

SEQ ID NO: 5469 - RNA, 20 nt, synthetic construct
  source 1..20: mol_type = other RNA
gattgaccccggaagtatac

SEQ ID NO: 5470 - RNA, 20 nt, synthetic construct
  source 1..20: mol_type = other RNA
gattgtcagctactaatgat

SEQ ID NO: 5471 - RNA, 20 nt, synthetic construct
  source 1..20: mol_type = other RNA
gattgtcaggaagcattcaa

SEQ ID NO: 5472 - RNA, 20 nt, synthetic construct
  source 1..20: mol_type = other RNA
gatttaagggatggaaaagg

SEQ ID NO: 5473 - RNA, 20 nt, synthetic construct
  source 1..20: mol_type = other RNA
gatttatttcaggcaagtcc

SEQ ID NO: 5474 - RNA, 20 nt, synthetic construct
  source 1..20: mol_type = other RNA
gattttgaatgcttcctgac

SEQ ID NO: 5475 - RNA, 20 nt, synthetic construct
  source 1..20: mol_type = other RNA
gatttttaagcactattaga

SEQ ID NO: 5476 - RNA, 20 nt, synthetic construct
  source 1..20: mol_type = other RNA
gcaacaacctgcccctgagc

SEQ ID NO: 5477 - RNA, 20 nt, synthetic construct
  source 1..20: mol_type = other RNA
gcaacccatattttcctaat

SEQ ID NO: 5478 - RNA, 20 nt, synthetic construct
  source 1..20: mol_type = other RNA
gcaagagagatgttttgggg

SEQ ID NO: 5479 - RNA, 20 nt, synthetic construct
  source 1..20: mol_type = other RNA
gcaagattgaccccggaagt

SEQ ID NO: 5480 - RNA, 20 nt, synthetic construct
  source 1..20: mol_type = other RNA
gcaagcctctagtcttcctt

SEQ ID NO: 5481 - RNA, 20 nt, synthetic construct
  source 1..20: mol_type = other RNA
gcaaggcccaccttgagagg

SEQ ID NO: 5482 - RNA, 20 nt, synthetic construct
  source 1..20: mol_type = other RNA
gcaagtccaactcaaggtcc

SEQ ID NO: 5483 - RNA, 20 nt, synthetic construct
  source 1..20: mol_type = other RNA
gcaattgtaggggtgtgtgt

SEQ ID NO: 5484 - RNA, 20 nt, synthetic construct
  source 1..20: mol_type = other RNA
gcacatctacataaatattt

SEQ ID NO: 5485 - RNA, 20 nt, synthetic construct
  source 1..20: mol_type = other RNA
gcaccgagaatgttgtattc

SEQ ID NO: 5486 - RNA, 20 nt, synthetic construct
  source 1..20: mol_type = other RNA
gcactaagatgagtgtagaa

SEQ ID NO: 5487 - RNA, 20 nt, synthetic construct
  source 1..20: mol_type = other RNA
gcactactgggcagatgtgg

SEQ ID NO: 5488 - RNA, 20 nt, synthetic construct
  source 1..20: mol_type = other RNA
gcactattagagttgattgt

SEQ ID NO: 5489 - RNA, 20 nt, synthetic construct
  source 1..20: mol_type = other RNA
gcactggaaatacacatgct

SEQ ID NO: 5490 - RNA, 20 nt, synthetic construct
  source 1..20: mol_type = other RNA
gcactggtaagattgaacac

SEQ ID NO: 5491 - RNA, 20 nt, synthetic construct
  source 1..20: mol_type = other RNA
gcactttgggattctttcca

SEQ ID NO: 5492 - RNA, 20 nt, synthetic construct
  source 1..20: mol_type = other RNA
gcagatgtgggcccgcagca

SEQ ID NO: 5493 - RNA, 20 nt, synthetic construct
  source 1..20: mol_type = other RNA
gcagattgaaaaggacacct

SEQ ID NO: 5494 - RNA, 20 nt, synthetic construct
  source 1..20: mol_type = other RNA
gcagcagctacctgggggca

SEQ ID NO: 5495 - RNA, 20 nt, synthetic construct
  source 1..20: mol_type = other RNA
gcagcatcttcacttctaaa

SEQ ID NO: 5496 - RNA, 20 nt, synthetic construct
  source 1..20: mol_type = other RNA
gcagcccagagttctatgtt

SEQ ID NO: 5497 - RNA, 20 nt, synthetic construct
  source 1..20: mol_type = other RNA
gcagctaccaggtgttctac

SEQ ID NO: 5498 - RNA, 20 nt, synthetic construct
  source 1..20: mol_type = other RNA
gcagctacctgggggcagtg

SEQ ID NO: 5499 - RNA, 20 nt, synthetic construct
  source 1..20: mol_type = other RNA
gcaggacaattccataggtg

SEQ ID NO: 5500 - RNA, 20 nt, synthetic construct
  source 1..20: mol_type = other RNA
gcaggttgttgcaagattga

SEQ ID NO: 5501 - RNA, 20 nt, synthetic construct
  source 1..20: mol_type = other RNA
gcagtagctcatcatcttcc

SEQ ID NO: 5502 - RNA, 20 nt, synthetic construct
  source 1..20: mol_type = other RNA
gcagtgttcaatcttaccag

SEQ ID NO: 5503 - RNA, 20 nt, synthetic construct
  source 1..20: mol_type = other RNA
gcataataagctaaagaggc

SEQ ID NO: 5504 - RNA, 20 nt, synthetic construct
  source 1..20: mol_type = other RNA
gcatatcctgagccatcggt

SEQ ID NO: 5505 - RNA, 20 nt, synthetic construct
  source 1..20: mol_type = other RNA
gcatcttcacttctaaatgc

SEQ ID NO: 5506 - RNA, 20 nt, synthetic construct
  source 1..20: mol_type = other RNA
gcatgaaaaagcagctacca

SEQ ID NO: 5507 - RNA, 20 nt, synthetic construct
  source 1..20: mol_type = other RNA
gcatgactattccttgttga

SEQ ID NO: 5508 - RNA, 20 nt, synthetic construct
  source 1..20: mol_type = other RNA
gcatggaccttgagttggac

SEQ ID NO: 5509 - RNA, 20 nt, synthetic construct
  source 1..20: mol_type = other RNA
gcatgtaagaagaccctcac

SEQ ID NO: 5510 - RNA, 20 nt, synthetic construct
  source 1..20: mol_type = other RNA
gcatgtgtatttccagtgca

SEQ ID NO: 5511 - RNA, 20 nt, synthetic construct
  source 1..20: mol_type = other RNA
gcattcaaaatcttgaccaa

SEQ ID NO: 5512 - RNA, 20 nt, synthetic construct
  source 1..20: mol_type = other RNA
gcattggcctctttcagcct

SEQ ID NO: 5513 - RNA, 20 nt, synthetic construct
  source 1..20: mol_type = other RNA
gcatttagaagtgaagatgc

SEQ ID NO: 5514 - RNA, 20 nt, synthetic construct
  source 1..20: mol_type = other RNA
gcatttgaggtcaagtaaga

SEQ ID NO: 5515 - RNA, 20 nt, synthetic construct
  source 1..20: mol_type = other RNA
gcatttggtcaagattttga

SEQ ID NO: 5516 - RNA, 20 nt, synthetic construct
  source 1..20: mol_type = other RNA
gcatttttgtgaaatgaaaa

SEQ ID NO: 5517 - RNA, 20 nt, synthetic construct
  source 1..20: mol_type = other RNA
gccaatgccccactggcagc

SEQ ID NO: 5518 - RNA, 20 nt, synthetic construct
  source 1..20: mol_type = other RNA
gccacaaggtctacatgagg

SEQ ID NO: 5519 - RNA, 20 nt, synthetic construct
  source 1..20: mol_type = other RNA
gccacccttcttatacttca

SEQ ID NO: 5520 - RNA, 20 nt, synthetic construct
  source 1..20: mol_type = other RNA
gccagacaaatggaggaata

SEQ ID NO: 5521 - RNA, 20 nt, synthetic construct
  source 1..20: mol_type = other RNA
gccagtggggcattggcctc

SEQ ID NO: 5522 - RNA, 20 nt, synthetic construct
  source 1..20: mol_type = other RNA
gccatcggtgaaactaacag

SEQ ID NO: 5523 - RNA, 20 nt, synthetic construct
  source 1..20: mol_type = other RNA
gccatgtgaagagggagaag

SEQ ID NO: 5524 - RNA, 20 nt, synthetic construct
  source 1..20: mol_type = other RNA
gcccacatctgcccagtagt

SEQ ID NO: 5525 - RNA, 20 nt, synthetic construct
  source 1..20: mol_type = other RNA
gcccaccttgagaggtgagt

SEQ ID NO: 5526 - RNA, 20 nt, synthetic construct
  source 1..20: mol_type = other RNA
gcccagagttctatgttctt

SEQ ID NO: 5527 - RNA, 20 nt, synthetic construct
  source 1..20: mol_type = other RNA
gcccagtagtgcagtagctc

SEQ ID NO: 5528 - RNA, 20 nt, synthetic construct
  source 1..20: mol_type = other RNA
gcccagtttcattgatcaca

SEQ ID NO: 5529 - RNA, 20 nt, synthetic construct
  source 1..20: mol_type = other RNA
gccccactggcagcatcttc

SEQ ID NO: 5530 - RNA, 20 nt, synthetic construct
  source 1..20: mol_type = other RNA
gcccccaggtagctgctgcg

SEQ ID NO: 5531 - RNA, 20 nt, synthetic construct
  source 1..20: mol_type = other RNA
gcccctgagccacaaggtct

SEQ ID NO: 5532 - RNA, 20 nt, synthetic construct
  source 1..20: mol_type = other RNA
gcccgcagcagctacctggg

SEQ ID NO: 5533 - RNA, 20 nt, synthetic construct
  source 1..20: mol_type = other RNA
gccgaaaaacgtctgagatt

SEQ ID NO: 5534 - RNA, 20 nt, synthetic construct
  source 1..20: mol_type = other RNA
gcctaaatactctcaggcac

SEQ ID NO: 5535 - RNA, 20 nt, synthetic construct
  source 1..20: mol_type = other RNA
gcctctagtcttccttttcc

SEQ ID NO: 5536 - RNA, 20 nt, synthetic construct
  source 1..20: mol_type = other RNA
gcctctggaatgggaagaca

SEQ ID NO: 5537 - RNA, 20 nt, synthetic construct
  source 1..20: mol_type = other RNA
gcctctttagcttattatgc

SEQ ID NO: 5538 - RNA, 20 nt, synthetic construct
  source 1..20: mol_type = other RNA
gcctctttcagcctctttag

SEQ ID NO: 5539 - RNA, 20 nt, synthetic construct
  source 1..20: mol_type = other RNA
gcctgaaataaatccaaaag

SEQ ID NO: 5540 - RNA, 20 nt, synthetic construct
  source 1..20: mol_type = other RNA
gcctgagagtatttaggcag

SEQ ID NO: 5541 - RNA, 20 nt, synthetic construct
  source 1..20: mol_type = other RNA
gcctgtaacaaagaatcata

SEQ ID NO: 5542 - RNA, 20 nt, synthetic construct
  source 1..20: mol_type = other RNA
gccttgctacctcaaggggg

SEQ ID NO: 5543 - RNA, 20 nt, synthetic construct
  source 1..20: mol_type = other RNA
gccttgtgatcaatgaaact

SEQ ID NO: 5544 - RNA, 20 nt, synthetic construct
  source 1..20: mol_type = other RNA
gcgggcccacatctgcccag

SEQ ID NO: 5545 - RNA, 20 nt, synthetic construct
  source 1..20: mol_type = other RNA
gctaaagaggctgaaagagg

SEQ ID NO: 5546 - RNA, 20 nt, synthetic construct
  source 1..20: mol_type = other RNA
gctacagacattttgaaccc

SEQ ID NO: 5547 - RNA, 20 nt, synthetic construct
  source 1..20: mol_type = other RNA
gctaccaggtgttctacact

SEQ ID NO: 5548 - RNA, 20 nt, synthetic construct
  source 1..20: mol_type = other RNA
gctacctcaagggggactgt

SEQ ID NO: 5549 - RNA, 20 nt, synthetic construct
  source 1..20: mol_type = other RNA
gctacctgggggcagtgttc

SEQ ID NO: 5550 - RNA, 20 nt, synthetic construct
  source 1..20: mol_type = other RNA
gctactaatgatgttttcct

SEQ ID NO: 5551 - RNA, 20 nt, synthetic construct
  source 1..20: mol_type = other RNA
gctactgcactactgggcag

SEQ ID NO: 5552 - RNA, 20 nt, synthetic construct
  source 1..20: mol_type = other RNA
gctcagatacgttgacatat

SEQ ID NO: 5553 - RNA, 20 nt, synthetic construct
  source 1..20: mol_type = other RNA
gctcaggatatgcatttaga

SEQ ID NO: 5554 - RNA, 20 nt, synthetic construct
  source 1..20: mol_type = other RNA
gctcaggggcaggttgttgc

SEQ ID NO: 5555 - RNA, 20 nt, synthetic construct
  source 1..20: mol_type = other RNA
gctcataaacattaggtgag

SEQ ID NO: 5556 - RNA, 20 nt, synthetic construct
  source 1..20: mol_type = other RNA
gctcatcatcttcccctcca

SEQ ID NO: 5557 - RNA, 20 nt, synthetic construct
  source 1..20: mol_type = other RNA
gctcctcaactcacctaatg

SEQ ID NO: 5558 - RNA, 20 nt, synthetic construct
  source 1..20: mol_type = other RNA
gctccttttggatttatttc

SEQ ID NO: 5559 - RNA, 20 nt, synthetic construct
  source 1..20: mol_type = other RNA
gctctaagagaagcactttg

SEQ ID NO: 5560 - RNA, 20 nt, synthetic construct
  source 1..20: mol_type = other RNA
gctctctctggtcaattttg

SEQ ID NO: 5561 - RNA, 20 nt, synthetic construct
  source 1..20: mol_type = other RNA
gctgaaagaggccaatgccc

SEQ ID NO: 5562 - RNA, 20 nt, synthetic construct
  source 1..20: mol_type = other RNA
gctgacaatcaatgattttt

SEQ ID NO: 5563 - RNA, 20 nt, synthetic construct
  source 1..20: mol_type = other RNA
gctgatcatttatatgtcaa

SEQ ID NO: 5564 - RNA, 20 nt, synthetic construct
  source 1..20: mol_type = other RNA
gctgccagtggggcattggc

SEQ ID NO: 5565 - RNA, 20 nt, synthetic construct
  source 1..20: mol_type = other RNA
gctgccatgtgaagagggag

SEQ ID NO: 5566 - RNA, 20 nt, synthetic construct
  source 1..20: mol_type = other RNA
gctgcgggcccacatctgcc

SEQ ID NO: 5567 - RNA, 20 nt, synthetic construct
  source 1..20: mol_type = other RNA
gctgctgcgggcccacatct

SEQ ID NO: 5568 - RNA, 20 nt, synthetic construct
  source 1..20: mol_type = other RNA
gctgctttttcatgcttctc

SEQ ID NO: 5569 - RNA, 20 nt, synthetic construct
  source 1..20: mol_type = other RNA
gctgtactttgtatattcca

SEQ ID NO: 5570 - RNA, 20 nt, synthetic construct
  source 1..20: mol_type = other RNA
gctgtgttaggaatgaaatg

SEQ ID NO: 5571 - RNA, 20 nt, synthetic construct
  source 1..20: mol_type = other RNA
gcttaaaaatcattgattgt

SEQ ID NO: 5572 - RNA, 20 nt, synthetic construct
  source 1..20: mol_type = other RNA
gcttatataagccgaaaaac

SEQ ID NO: 5573 - RNA, 20 nt, synthetic construct
  source 1..20: mol_type = other RNA
gcttatataagctctaagag

SEQ ID NO: 5574 - RNA, 20 nt, synthetic construct
  source 1..20: mol_type = other RNA
gcttatctgttagtttcacc

SEQ ID NO: 5575 - RNA, 20 nt, synthetic construct
  source 1..20: mol_type = other RNA
gcttattatgcaagcctcta

SEQ ID NO: 5576 - RNA, 20 nt, synthetic construct
  source 1..20: mol_type = other RNA
gcttcctgacaatcaactct

SEQ ID NO: 5577 - RNA, 20 nt, synthetic construct
  source 1..20: mol_type = other RNA
gcttctccctcttcacatgg

SEQ ID NO: 5578 - RNA, 20 nt, synthetic construct
  source 1..20: mol_type = other RNA
gcttctcttagagcttatat

SEQ ID NO: 5579 - RNA, 20 nt, synthetic construct
  source 1..20: mol_type = other RNA
gcttgcataataagctaaag

SEQ ID NO: 5580 - RNA, 20 nt, synthetic construct
  source 1..20: mol_type = other RNA
gctttctggagtgaagtata

SEQ ID NO: 5581 - RNA, 20 nt, synthetic construct
  source 1..20: mol_type = other RNA
gctttttcatgcttctccct

SEQ ID NO: 5582 - RNA, 20 nt, synthetic construct
  source 1..20: mol_type = other RNA
ggaaaacatcattagtagct

SEQ ID NO: 5583 - RNA, 20 nt, synthetic construct
  source 1..20: mol_type = other RNA
ggaaaaggaagactagaggc

SEQ ID NO: 5584 - RNA, 20 nt, synthetic construct
  source 1..20: mol_type = other RNA
ggaaaatatgggttgcattt

SEQ ID NO: 5585 - RNA, 20 nt, synthetic construct
  source 1..20: mol_type = other RNA
ggaaagaatcccaaagtgct

SEQ ID NO: 5586 - RNA, 20 nt, synthetic construct
  source 1..20: mol_type = other RNA
ggaaatacacatgctgtgtt

SEQ ID NO: 5587 - RNA, 20 nt, synthetic construct
  source 1..20: mol_type = other RNA
ggaactctaagtatccccag

SEQ ID NO: 5588 - RNA, 20 nt, synthetic construct
  source 1..20: mol_type = other RNA
ggaagaacatagaactctgg

SEQ ID NO: 5589 - RNA, 20 nt, synthetic construct
  source 1..20: mol_type = other RNA
ggaagacacctatggaattg

SEQ ID NO: 5590 - RNA, 20 nt, synthetic construct
  source 1..20: mol_type = other RNA
ggaagactagaggcttgcat

SEQ ID NO: 5591 - RNA, 20 nt, synthetic construct
  source 1..20: mol_type = other RNA
ggaagatgatgagctactgc

SEQ ID NO: 5592 - RNA, 20 nt, synthetic construct
  source 1..20: mol_type = other RNA
ggaagcattcaaaatcttga

SEQ ID NO: 5593 - RNA, 20 nt, synthetic construct
  source 1..20: mol_type = other RNA
ggaagtatactttggaatat

SEQ ID NO: 5594 - RNA, 20 nt, synthetic construct
  source 1..20: mol_type = other RNA
ggaatatacaaagtacagcc

SEQ ID NO: 5595 - RNA, 20 nt, synthetic construct
  source 1..20: mol_type = other RNA
ggaatatgacggaagaacat

SEQ ID NO: 5596 - RNA, 20 nt, synthetic construct
  source 1..20: mol_type = other RNA
ggaatctcagacgtttttcg

SEQ ID NO: 5597 - RNA, 20 nt, synthetic construct
  source 1..20: mol_type = other RNA
ggaatgaaatgagtccccaa

SEQ ID NO: 5598 - RNA, 20 nt, synthetic construct
  source 1..20: mol_type = other RNA
ggaatgggaagacacctatg

SEQ ID NO: 5599 - RNA, 20 nt, synthetic construct
  source 1..20: mol_type = other RNA
ggaattgtcctgctttctgg

SEQ ID NO: 5600 - RNA, 20 nt, synthetic construct
  source 1..20: mol_type = other RNA
ggacaattccataggtgtct

SEQ ID NO: 5601 - RNA, 20 nt, synthetic construct
  source 1..20: mol_type = other RNA
ggacaccttttaactcacct

SEQ ID NO: 5602 - RNA, 20 nt, synthetic construct
  source 1..20: mol_type = other RNA
ggaccttgagaccacagggt

SEQ ID NO: 5603 - RNA, 20 nt, synthetic construct
  source 1..20: mol_type = other RNA
ggaccttgagttggacttgc

SEQ ID NO: 5604 - RNA, 20 nt, synthetic construct
  source 1..20: mol_type = other RNA
ggactcatttcattcctaac

SEQ ID NO: 5605 - RNA, 20 nt, synthetic construct
  source 1..20: mol_type = other RNA
ggactgtctttcagatacat

SEQ ID NO: 5606 - RNA, 20 nt, synthetic construct
  source 1..20: mol_type = other RNA
ggacttgcctgaaataaatc

SEQ ID NO: 5607 - RNA, 20 nt, synthetic construct
  source 1..20: mol_type = other RNA
ggagaagcatgaaaaagcag

SEQ ID NO: 5608 - RNA, 20 nt, synthetic construct
  source 1..20: mol_type = other RNA
ggagctacagacattttgaa

SEQ ID NO: 5609 - RNA, 20 nt, synthetic construct
  source 1..20: mol_type = other RNA
ggagctttcaacaaggaata

SEQ ID NO: 5610 - RNA, 20 nt, synthetic construct
  source 1..20: mol_type = other RNA
ggaggaatatgacggaagaa

SEQ ID NO: 5611 - RNA, 20 nt, synthetic construct
  source 1..20: mol_type = other RNA
ggaggggaagatgatgagct

SEQ ID NO: 5612 - RNA, 20 nt, synthetic construct
  source 1..20: mol_type = other RNA
ggagtgaagtataagaaggg

SEQ ID NO: 5613 - RNA, 20 nt, synthetic construct
  source 1..20: mol_type = other RNA
ggatacttagagttcctcat

SEQ ID NO: 5614 - RNA, 20 nt, synthetic construct
  source 1..20: mol_type = other RNA
ggatatgcatttagaagtga

SEQ ID NO: 5615 - RNA, 20 nt, synthetic construct
  source 1..20: mol_type = other RNA
ggatctggtgatgatggagg

SEQ ID NO: 5616 - RNA, 20 nt, synthetic construct
  source 1..20: mol_type = other RNA
ggatggaaaaggaagactag

SEQ ID NO: 5617 - RNA, 20 nt, synthetic construct
  source 1..20: mol_type = other RNA
ggattctttccattatgatt

SEQ ID NO: 5618 - RNA, 20 nt, synthetic construct
  source 1..20: mol_type = other RNA
ggatttaagggatggaaaag

SEQ ID NO: 5619 - RNA, 20 nt, synthetic construct
  source 1..20: mol_type = other RNA
ggatttatttcaggcaagtc

SEQ ID NO: 5620 - RNA, 20 nt, synthetic construct
  source 1..20: mol_type = other RNA
ggcaagtccaactcaaggtc

SEQ ID NO: 5621 - RNA, 20 nt, synthetic construct
  source 1..20: mol_type = other RNA
ggcaccgagaatgttgtatt

SEQ ID NO: 5622 - RNA, 20 nt, synthetic construct
  source 1..20: mol_type = other RNA
ggcactaagatgagtgtaga

SEQ ID NO: 5623 - RNA, 20 nt, synthetic construct
  source 1..20: mol_type = other RNA
ggcagatgtgggcccgcagc

SEQ ID NO: 5624 - RNA, 20 nt, synthetic construct
  source 1..20: mol_type = other RNA
ggcagattgaaaaggacacc

SEQ ID NO: 5625 - RNA, 20 nt, synthetic construct
  source 1..20: mol_type = other RNA
ggcagcatcttcacttctaa

SEQ ID NO: 5626 - RNA, 20 nt, synthetic construct
  source 1..20: mol_type = other RNA
ggcagcccagagttctatgt

SEQ ID NO: 5627 - RNA, 20 nt, synthetic construct
  source 1..20: mol_type = other RNA
ggcaggttgttgcaagattg

SEQ ID NO: 5628 - RNA, 20 nt, synthetic construct
  source 1..20: mol_type = other RNA
ggcagtgttcaatcttacca

SEQ ID NO: 5629 - RNA, 20 nt, synthetic construct
  source 1..20: mol_type = other RNA
ggcatggaccttgagttgga

SEQ ID NO: 5630 - RNA, 20 nt, synthetic construct
  source 1..20: mol_type = other RNA
ggcattggcctctttcagcc

SEQ ID NO: 5631 - RNA, 20 nt, synthetic construct
  source 1..20: mol_type = other RNA
ggccaatgccccactggcag

SEQ ID NO: 5632 - RNA, 20 nt, synthetic construct
  source 1..20: mol_type = other RNA
ggccacccttcttatacttc

SEQ ID NO: 5633 - RNA, 20 nt, synthetic construct
  source 1..20: mol_type = other RNA
ggcccacatctgcccagtag

SEQ ID NO: 5634 - RNA, 20 nt, synthetic construct
  source 1..20: mol_type = other RNA
ggcccaccttgagaggtgag

SEQ ID NO: 5635 - RNA, 20 nt, synthetic construct
  source 1..20: mol_type = other RNA
ggcccgcagcagctacctgg

SEQ ID NO: 5636 - RNA, 20 nt, synthetic construct
  source 1..20: mol_type = other RNA
ggcctctttcagcctcttta

SEQ ID NO: 5637 - RNA, 20 nt, synthetic construct
  source 1..20: mol_type = other RNA
ggccttgctacctcaagggg

SEQ ID NO: 5638 - RNA, 20 nt, synthetic construct
  source 1..20: mol_type = other RNA
ggccttgtgatcaatgaaac

SEQ ID NO: 5639 - RNA, 20 nt, synthetic construct
  source 1..20: mol_type = other RNA
ggctcaggatatgcatttag

SEQ ID NO: 5640 - RNA, 20 nt, synthetic construct
  source 1..20: mol_type = other RNA
ggctcaggggcaggttgttg

SEQ ID NO: 5641 - RNA, 20 nt, synthetic construct
  source 1..20: mol_type = other RNA
ggctcataaacattaggtga

SEQ ID NO: 5642 - RNA, 20 nt, synthetic construct
  source 1..20: mol_type = other RNA
ggctgaaagaggccaatgcc

SEQ ID NO: 5643 - RNA, 20 nt, synthetic construct
  source 1..20: mol_type = other RNA
ggctgccatgtgaagaggga

SEQ ID NO: 5644 - RNA, 20 nt, synthetic construct
  source 1..20: mol_type = other RNA
ggctgtactttgtatattcc

SEQ ID NO: 5645 - RNA, 20 nt, synthetic construct
  source 1..20: mol_type = other RNA
ggcttatataagctctaaga

SEQ ID NO: 5646 - RNA, 20 nt, synthetic construct
  source 1..20: mol_type = other RNA
ggcttgcataataagctaaa

SEQ ID NO: 5647 - RNA, 20 nt, synthetic construct
  source 1..20: mol_type = other RNA
gggaagacacctatggaatt

SEQ ID NO: 5648 - RNA, 20 nt, synthetic construct
  source 1..20: mol_type = other RNA
gggaagatgatgagctactg

SEQ ID NO: 5649 - RNA, 20 nt, synthetic construct
  source 1..20: mol_type = other RNA
gggactcatttcattcctaa

SEQ ID NO: 5650 - RNA, 20 nt, synthetic construct
  source 1..20: mol_type = other RNA
gggactgtctttcagataca

SEQ ID NO: 5651 - RNA, 20 nt, synthetic construct
  source 1..20: mol_type = other RNA
gggagaagcatgaaaaagca

SEQ ID NO: 5652 - RNA, 20 nt, synthetic construct
  source 1..20: mol_type = other RNA
gggatacttagagttcctca

SEQ ID NO: 5653 - RNA, 20 nt, synthetic construct
  source 1..20: mol_type = other RNA
gggatggaaaaggaagacta

SEQ ID NO: 5654 - RNA, 20 nt, synthetic construct
  source 1..20: mol_type = other RNA
gggattctttccattatgat

SEQ ID NO: 5655 - RNA, 20 nt, synthetic construct
  source 1..20: mol_type = other RNA
gggcagatgtgggcccgcag

SEQ ID NO: 5656 - RNA, 20 nt, synthetic construct
  source 1..20: mol_type = other RNA
gggcaggttgttgcaagatt

SEQ ID NO: 5657 - RNA, 20 nt, synthetic construct
  source 1..20: mol_type = other RNA
gggcagtgttcaatcttacc

SEQ ID NO: 5658 - RNA, 20 nt, synthetic construct
  source 1..20: mol_type = other RNA
gggcattggcctctttcagc

SEQ ID NO: 5659 - RNA, 20 nt, synthetic construct
  source 1..20: mol_type = other RNA
gggcccacatctgcccagta

SEQ ID NO: 5660 - RNA, 20 nt, synthetic construct
  source 1..20: mol_type = other RNA
gggcccgcagcagctacctg

SEQ ID NO: 5661 - RNA, 20 nt, synthetic construct
  source 1..20: mol_type = other RNA
gggccttgctacctcaaggg

SEQ ID NO: 5662 - RNA, 20 nt, synthetic construct
  source 1..20: mol_type = other RNA
gggctgccatgtgaagaggg

SEQ ID NO: 5663 - RNA, 20 nt, synthetic construct
  source 1..20: mol_type = other RNA
gggctgtactttgtatattc

SEQ ID NO: 5664 - RNA, 20 nt, synthetic construct
  source 1..20: mol_type = other RNA
ggggaagatgatgagctact

SEQ ID NO: 5665 - RNA, 20 nt, synthetic construct
  source 1..20: mol_type = other RNA
ggggactcatttcattccta

SEQ ID NO: 5666 - RNA, 20 nt, synthetic construct
  source 1..20: mol_type = other RNA
ggggactgtctttcagatac

SEQ ID NO: 5667 - RNA, 20 nt, synthetic construct
  source 1..20: mol_type = other RNA
ggggatacttagagttcctc

SEQ ID NO: 5668 - RNA, 20 nt, synthetic construct
  source 1..20: mol_type = other RNA
ggggcaggttgttgcaagat

SEQ ID NO: 5669 - RNA, 20 nt, synthetic construct
  source 1..20: mol_type = other RNA
ggggcagtgttcaatcttac

SEQ ID NO: 5670 - RNA, 20 nt, synthetic construct
  source 1..20: mol_type = other RNA
ggggcattggcctctttcag

SEQ ID NO: 5671 - RNA, 20 nt, synthetic construct
  source 1..20: mol_type = other RNA
gggggactgtctttcagata

SEQ ID NO: 5672 - RNA, 20 nt, synthetic construct
  source 1..20: mol_type = other RNA
gggggcagtgttcaatctta

SEQ ID NO: 5673 - RNA, 20 nt, synthetic construct
  source 1..20: mol_type = other RNA
ggggtcaatcttgcaacaac

SEQ ID NO: 5674 - RNA, 20 nt, synthetic construct
  source 1..20: mol_type = other RNA
gggtcaatcttgcaacaacc

SEQ ID NO: 5675 - RNA, 20 nt, synthetic construct
  source 1..20: mol_type = other RNA
gggtcttcttacatgcattt

SEQ ID NO: 5676 - RNA, 20 nt, synthetic construct
  source 1..20: mol_type = other RNA
gggtggccttgtgatcaatg

SEQ ID NO: 5677 - RNA, 20 nt, synthetic construct
  source 1..20: mol_type = other RNA
gggttcaaaatgtctgtagc

SEQ ID NO: 5678 - RNA, 20 nt, synthetic construct
  source 1..20: mol_type = other RNA
gggttgcatttggtcaagat

SEQ ID NO: 5679 - RNA, 20 nt, synthetic construct
  source 1..20: mol_type = other RNA
ggtaagattgaacactgccc

SEQ ID NO: 5680 - RNA, 20 nt, synthetic construct
  source 1..20: mol_type = other RNA
ggtagcaaggcccaccttga

SEQ ID NO: 5681 - RNA, 20 nt, synthetic construct
  source 1..20: mol_type = other RNA
ggtagctgctgcgggcccac

SEQ ID NO: 5682 - RNA, 20 nt, synthetic construct
  source 1..20: mol_type = other RNA
ggtagctgctttttcatgct

SEQ ID NO: 5683 - RNA, 20 nt, synthetic construct
  source 1..20: mol_type = other RNA
ggtcaagattttgaatgctt

SEQ ID NO: 5684 - RNA, 20 nt, synthetic construct
  source 1..20: mol_type = other RNA
ggtcaagtaagaagacatga

SEQ ID NO: 5685 - RNA, 20 nt, synthetic construct
  source 1..20: mol_type = other RNA
ggtcaatcttgcaacaacct

SEQ ID NO: 5686 - RNA, 20 nt, synthetic construct
  source 1..20: mol_type = other RNA
ggtcaattttgaggaatctc

SEQ ID NO: 5687 - RNA, 20 nt, synthetic construct
  source 1..20: mol_type = other RNA
ggtcacaaccatgtatctga

SEQ ID NO: 5688 - RNA, 20 nt, synthetic construct
  source 1..20: mol_type = other RNA
ggtccacttggttcatgtct

SEQ ID NO: 5689 - RNA, 20 nt, synthetic construct
  source 1..20: mol_type = other RNA
ggtccatgcctctggaatgg

SEQ ID NO: 5690 - RNA, 20 nt, synthetic construct
  source 1..20: mol_type = other RNA
ggtctacatgaggaactcta

SEQ ID NO: 5691 - RNA, 20 nt, synthetic construct
  source 1..20: mol_type = other RNA
ggtctcaaggtccacttggt

SEQ ID NO: 5692 - RNA, 20 nt, synthetic construct
  source 1..20: mol_type = other RNA
ggtcttcttacatgcatttg

SEQ ID NO: 5693 - RNA, 20 nt, synthetic construct
  source 1..20: mol_type = other RNA
ggtgaaactaacagataagc

SEQ ID NO: 5694 - RNA, 20 nt, synthetic construct
  source 1..20: mol_type = other RNA
ggtgagttaaaaggtgtcct

SEQ ID NO: 5695 - RNA, 20 nt, synthetic construct
  source 1..20: mol_type = other RNA
ggtgagttgaggagctacag

SEQ ID NO: 5696 - RNA, 20 nt, synthetic construct
  source 1..20: mol_type = other RNA
ggtgatgatggaggggaaga

SEQ ID NO: 5697 - RNA, 20 nt, synthetic construct
  source 1..20: mol_type = other RNA
ggtgcctgtaacaaagaatc

SEQ ID NO: 5698 - RNA, 20 nt, synthetic construct
  source 1..20: mol_type = other RNA
ggtggccttgtgatcaatga

SEQ ID NO: 5699 - RNA, 20 nt, synthetic construct
  source 1..20: mol_type = other RNA
ggtgggccttgctacctcaa

SEQ ID NO: 5700 - RNA, 20 nt, synthetic construct
  source 1..20: mol_type = other RNA
ggtgtccttttcaatctgcc

SEQ ID NO: 5701 - RNA, 20 nt, synthetic construct
  source 1..20: mol_type = other RNA
ggtgtcttcccattccagag

SEQ ID NO: 5702 - RNA, 20 nt, synthetic construct
  source 1..20: mol_type = other RNA
ggtgttctacactcatctta

SEQ ID NO: 5703 - RNA, 20 nt, synthetic construct
  source 1..20: mol_type = other RNA
ggttcaaaatgtctgtagct

SEQ ID NO: 5704 - RNA, 20 nt, synthetic construct
  source 1..20: mol_type = other RNA
ggttcatgtcttcttacttg

SEQ ID NO: 5705 - RNA, 20 nt, synthetic construct
  source 1..20: mol_type = other RNA
ggttgcatttggtcaagatt

SEQ ID NO: 5706 - RNA, 20 nt, synthetic construct
  source 1..20: mol_type = other RNA
ggttgtgacctgaggattta

SEQ ID NO: 5707 - RNA, 20 nt, synthetic construct
  source 1..20: mol_type = other RNA
ggttgttgcaagattgaccc

SEQ ID NO: 5708 - RNA, 20 nt, synthetic construct
  source 1..20: mol_type = other RNA
gtaacaaagaatcataatgg

SEQ ID NO: 5709 - RNA, 20 nt, synthetic construct
  source 1..20: mol_type = other RNA
gtaagaagacatgaaccaag

SEQ ID NO: 5710 - RNA, 20 nt, synthetic construct
  source 1..20: mol_type = other RNA
gtaagaagaccctcactgaa

SEQ ID NO: 5711 - RNA, 20 nt, synthetic construct
  source 1..20: mol_type = other RNA
gtaagattgaacactgcccc

SEQ ID NO: 5712 - RNA, 20 nt, synthetic construct
  source 1..20: mol_type = other RNA
gtacagcccagtttcattga

SEQ ID NO: 5713 - RNA, 20 nt, synthetic construct
  source 1..20: mol_type = other RNA
gtacatattaggaaaatatg

SEQ ID NO: 5714 - RNA, 20 nt, synthetic construct
  source 1..20: mol_type = other RNA
gtacttcacaatatctacat

SEQ ID NO: 5715 - RNA, 20 nt, synthetic construct
  source 1..20: mol_type = other RNA
gtactttgtatattccaaag

SEQ ID NO: 5716 - RNA, 20 nt, synthetic construct
  source 1..20: mol_type = other RNA
gtagaacacctggtagctgc

SEQ ID NO: 5717 - RNA, 20 nt, synthetic construct
  source 1..20: mol_type = other RNA
gtagaccttgtggctcaggg

SEQ ID NO: 5718 - RNA, 20 nt, synthetic construct
  source 1..20: mol_type = other RNA
gtagatattgtgaagtacat

SEQ ID NO: 5719 - RNA, 20 nt, synthetic construct
  source 1..20: mol_type = other RNA
gtagatgtgcatttttgtga

SEQ ID NO: 5720 - RNA, 20 nt, synthetic construct
  source 1..20: mol_type = other RNA
gtagcaaggcccaccttgag

SEQ ID NO: 5721 - RNA, 20 nt, synthetic construct
  source 1..20: mol_type = other RNA
gtagctcatcatcttcccct

SEQ ID NO: 5722 - RNA, 20 nt, synthetic construct
  source 1..20: mol_type = other RNA
gtagctcctcaactcaccta

SEQ ID NO: 5723 - RNA, 20 nt, synthetic construct
  source 1..20: mol_type = other RNA
gtagctgacaatcaatgatt

SEQ ID NO: 5724 - RNA, 20 nt, synthetic construct
  source 1..20: mol_type = other RNA
gtagctgctgcgggcccaca

SEQ ID NO: 5725 - RNA, 20 nt, synthetic construct
  source 1..20: mol_type = other RNA
gtagctgctttttcatgctt

SEQ ID NO: 5726 - RNA, 20 nt, synthetic construct
  source 1..20: mol_type = other RNA
gtagtgcagtagctcatcat

SEQ ID NO: 5727 - RNA, 20 nt, synthetic construct
  source 1..20: mol_type = other RNA
gtataagaagggtggccttg

SEQ ID NO: 5728 - RNA, 20 nt, synthetic construct
  source 1..20: mol_type = other RNA
gtatacttccggggtcaatc

SEQ ID NO: 5729 - RNA, 20 nt, synthetic construct
  source 1..20: mol_type = other RNA
gtatactttggaatatacaa

SEQ ID NO: 5730 - RNA, 20 nt, synthetic construct
  source 1..20: mol_type = other RNA
gtatatgttaggatacaaat

SEQ ID NO: 5731 - RNA, 20 nt, synthetic construct
  source 1..20: mol_type = other RNA
gtatattccaaagtatactt

SEQ ID NO: 5732 - RNA, 20 nt, synthetic construct
  source 1..20: mol_type = other RNA
gtatccccaggatctggtga

SEQ ID NO: 5733 - RNA, 20 nt, synthetic construct
  source 1..20: mol_type = other RNA
gtatcctaacatatactttt

SEQ ID NO: 5734 - RNA, 20 nt, synthetic construct
  source 1..20: mol_type = other RNA
gtatctgaaagacagtcccc

SEQ ID NO: 5735 - RNA, 20 nt, synthetic construct
  source 1..20: mol_type = other RNA
gtatctgagctctctctggt

SEQ ID NO: 5736 - RNA, 20 nt, synthetic construct
  source 1..20: mol_type = other RNA
gtatgactaaagagagaatg

SEQ ID NO: 5737 - RNA, 20 nt, synthetic construct
  source 1..20: mol_type = other RNA
gtattcagtgagggtcttct

SEQ ID NO: 5738 - RNA, 20 nt, synthetic construct
  source 1..20: mol_type = other RNA
gtatttaggcagattgaaaa

SEQ ID NO: 5739 - RNA, 20 nt, synthetic construct
  source 1..20: mol_type = other RNA
gtatttccagtgcaattgta

SEQ ID NO: 5740 - RNA, 20 nt, synthetic construct
  source 1..20: mol_type = other RNA
gtcaacgtatctgagctctc

SEQ ID NO: 5741 - RNA, 20 nt, synthetic construct
  source 1..20: mol_type = other RNA
gtcaagattttgaatgcttc

SEQ ID NO: 5742 - RNA, 20 nt, synthetic construct
  source 1..20: mol_type = other RNA
gtcaagtaagaagacatgaa

SEQ ID NO: 5743 - RNA, 20 nt, synthetic construct
  source 1..20: mol_type = other RNA
gtcaatcttgcaacaacctg

SEQ ID NO: 5744 - RNA, 20 nt, synthetic construct
  source 1..20: mol_type = other RNA
gtcaattttgaggaatctca

SEQ ID NO: 5745 - RNA, 20 nt, synthetic construct
  source 1..20: mol_type = other RNA
gtcacaaccatgtatctgaa

SEQ ID NO: 5746 - RNA, 20 nt, synthetic construct
  source 1..20: mol_type = other RNA
gtcagctactaatgatgttt

SEQ ID NO: 5747 - RNA, 20 nt, synthetic construct
  source 1..20: mol_type = other RNA
gtcaggaagcattcaaaatc

SEQ ID NO: 5748 - RNA, 20 nt, synthetic construct
  source 1..20: mol_type = other RNA
gtcatattcctccatttgtc

SEQ ID NO: 5749 - RNA, 20 nt, synthetic construct
  source 1..20: mol_type = other RNA
gtccaactcaaggtccatgc

SEQ ID NO: 5750 - RNA, 20 nt, synthetic construct
  source 1..20: mol_type = other RNA
gtccacttggttcatgtctt

SEQ ID NO: 5751 - RNA, 20 nt, synthetic construct
  source 1..20: mol_type = other RNA
gtccatgcctctggaatggg

SEQ ID NO: 5752 - RNA, 20 nt, synthetic construct
  source 1..20: mol_type = other RNA
gtccccaaaacatctctctt

SEQ ID NO: 5753 - RNA, 20 nt, synthetic construct
  source 1..20: mol_type = other RNA
gtcccccttgaggtagcaag

SEQ ID NO: 5754 - RNA, 20 nt, synthetic construct
  source 1..20: mol_type = other RNA
gtcctgctttctggagtgaa

SEQ ID NO: 5755 - RNA, 20 nt, synthetic construct
  source 1..20: mol_type = other RNA
gtccttttcaatctgcctaa

SEQ ID NO: 5756 - RNA, 20 nt, synthetic construct
  source 1..20: mol_type = other RNA
gtctacatgaggaactctaa

SEQ ID NO: 5757 - RNA, 20 nt, synthetic construct
  source 1..20: mol_type = other RNA
gtctcaaggtccacttggtt

SEQ ID NO: 5758 - RNA, 20 nt, synthetic construct
  source 1..20: mol_type = other RNA
gtctgagattcctcaaaatt

SEQ ID NO: 5759 - RNA, 20 nt, synthetic construct
  source 1..20: mol_type = other RNA
gtctggctcataaacattag

SEQ ID NO: 5760 - RNA, 20 nt, synthetic construct
  source 1..20: mol_type = other RNA
gtctgtagctcctcaactca

SEQ ID NO: 5761 - RNA, 20 nt, synthetic construct
  source 1..20: mol_type = other RNA
gtcttcccattccagaggca

SEQ ID NO: 5762 - RNA, 20 nt, synthetic construct
  source 1..20: mol_type = other RNA
gtcttccttttccatccctt

SEQ ID NO: 5763 - RNA, 20 nt, synthetic construct
  source 1..20: mol_type = other RNA
gtcttcttacatgcatttga

SEQ ID NO: 5764 - RNA, 20 nt, synthetic construct
  source 1..20: mol_type = other RNA
gtcttcttacttgacctcaa

SEQ ID NO: 5765 - RNA, 20 nt, synthetic construct
  source 1..20: mol_type = other RNA
gtctttcagatacatggttg

SEQ ID NO: 5766 - RNA, 20 nt, synthetic construct
  source 1..20: mol_type = other RNA
gtgaaactaacagataagca

SEQ ID NO: 5767 - RNA, 20 nt, synthetic construct
  source 1..20: mol_type = other RNA
gtgaaatgaaaacatgtaat

SEQ ID NO: 5768 - RNA, 20 nt, synthetic construct
  source 1..20: mol_type = other RNA
gtgaagagggagaagcatga

SEQ ID NO: 5769 - RNA, 20 nt, synthetic construct
  source 1..20: mol_type = other RNA
gtgaagatgctgccagtggg

SEQ ID NO: 5770 - RNA, 20 nt, synthetic construct
  source 1..20: mol_type = other RNA
gtgaagtacatattaggaaa

SEQ ID NO: 5771 - RNA, 20 nt, synthetic construct
  source 1..20: mol_type = other RNA
gtgaagtataagaagggtgg

SEQ ID NO: 5772 - RNA, 20 nt, synthetic construct
  source 1..20: mol_type = other RNA
gtgacctgaggatttaaggg

SEQ ID NO: 5773 - RNA, 20 nt, synthetic construct
  source 1..20: mol_type = other RNA
gtgagggtcttcttacatgc

SEQ ID NO: 5774 - RNA, 20 nt, synthetic construct
  source 1..20: mol_type = other RNA
gtgagttaaaaggtgtcctt

SEQ ID NO: 5775 - RNA, 20 nt, synthetic construct
  source 1..20: mol_type = other RNA
gtgagttgaggagctacaga

SEQ ID NO: 5776 - RNA, 20 nt, synthetic construct
  source 1..20: mol_type = other RNA
gtgatcaatgaaactgggct

SEQ ID NO: 5777 - RNA, 20 nt, synthetic construct
  source 1..20: mol_type = other RNA
gtgatgatggaggggaagat

SEQ ID NO: 5778 - RNA, 20 nt, synthetic construct
  source 1..20: mol_type = other RNA
gtgcaattgtaggggtgtgt

SEQ ID NO: 5779 - RNA, 20 nt, synthetic construct
  source 1..20: mol_type = other RNA
gtgcagtagctcatcatctt

SEQ ID NO: 5780 - RNA, 20 nt, synthetic construct
  source 1..20: mol_type = other RNA
gtgcatttttgtgaaatgaa

SEQ ID NO: 5781 - RNA, 20 nt, synthetic construct
  source 1..20: mol_type = other RNA
gtgcctgagagtatttaggc

SEQ ID NO: 5782 - RNA, 20 nt, synthetic construct
  source 1..20: mol_type = other RNA
gtgcctgtaacaaagaatca

SEQ ID NO: 5783 - RNA, 20 nt, synthetic construct
  source 1..20: mol_type = other RNA
gtgctgatcatttatatgtc

SEQ ID NO: 5784 - RNA, 20 nt, synthetic construct
  source 1..20: mol_type = other RNA
gtgcttaaaaatcattgatt

SEQ ID NO: 5785 - RNA, 20 nt, synthetic construct
  source 1..20: mol_type = other RNA
gtgcttctcttagagcttat

SEQ ID NO: 5786 - RNA, 20 nt, synthetic construct
  source 1..20: mol_type = other RNA
gtggaccttgagaccacagg

SEQ ID NO: 5787 - RNA, 20 nt, synthetic construct
  source 1..20: mol_type = other RNA
gtggccttgtgatcaatgaa

SEQ ID NO: 5788 - RNA, 20 nt, synthetic construct
  source 1..20: mol_type = other RNA
gtggctcaggggcaggttgt

SEQ ID NO: 5789 - RNA, 20 nt, synthetic construct
  source 1..20: mol_type = other RNA
gtgggcccgcagcagctacc

SEQ ID NO: 5790 - RNA, 20 nt, synthetic construct
  source 1..20: mol_type = other RNA
gtgggccttgctacctcaag

SEQ ID NO: 5791 - RNA, 20 nt, synthetic construct
  source 1..20: mol_type = other RNA
gtggggcattggcctctttc

SEQ ID NO: 5792 - RNA, 20 nt, synthetic construct
  source 1..20: mol_type = other RNA
gtggtctcaaggtccacttg

SEQ ID NO: 5793 - RNA, 20 nt, synthetic construct
  source 1..20: mol_type = other RNA
gtgtagaacacctggtagct

SEQ ID NO: 5794 - RNA, 20 nt, synthetic construct
  source 1..20: mol_type = other RNA
gtgtatgactaaagagagaa

SEQ ID NO: 5795 - RNA, 20 nt, synthetic construct
  source 1..20: mol_type = other RNA
gtgtatttccagtgcaattg

SEQ ID NO: 5796 - RNA, 20 nt, synthetic construct
  source 1..20: mol_type = other RNA
gtgtccttttcaatctgcct

SEQ ID NO: 5797 - RNA, 20 nt, synthetic construct
  source 1..20: mol_type = other RNA
gtgtcttcccattccagagg

SEQ ID NO: 5798 - RNA, 20 nt, synthetic construct
  source 1..20: mol_type = other RNA
gtgtgtatgactaaagagag

SEQ ID NO: 5799 - RNA, 20 nt, synthetic construct
  source 1..20: mol_type = other RNA
gtgtgtgtatgactaaagag

SEQ ID NO: 5800 - RNA, 20 nt, synthetic construct
  source 1..20: mol_type = other RNA
gtgtgtgtgtatgactaaag

SEQ ID NO: 5801 - RNA, 20 nt, synthetic construct
  source 1..20: mol_type = other RNA
gtgttaggaatgaaatgagt

SEQ ID NO: 5802 - RNA, 20 nt, synthetic construct
  source 1..20: mol_type = other RNA
gtgttcaatcttaccagtgc

SEQ ID NO: 5803 - RNA, 20 nt, synthetic construct
  source 1..20: mol_type = other RNA
gtgttctacactcatcttag

SEQ ID NO: 5804 - RNA, 20 nt, synthetic construct
  source 1..20: mol_type = other RNA
gttaaaaggtgtccttttca

SEQ ID NO: 5805 - RNA, 20 nt, synthetic construct
  source 1..20: mol_type = other RNA
gttacaggcaccgagaatgt

SEQ ID NO: 5806 - RNA, 20 nt, synthetic construct
  source 1..20: mol_type = other RNA
gttaggaatgaaatgagtcc

SEQ ID NO: 5807 - RNA, 20 nt, synthetic construct
  source 1..20: mol_type = other RNA
gttagtttcaccgatggctc

SEQ ID NO: 5808 - RNA, 20 nt, synthetic construct
  source 1..20: mol_type = other RNA
gttcaaaatgtctgtagctc

SEQ ID NO: 5809 - RNA, 20 nt, synthetic construct
  source 1..20: mol_type = other RNA
gttcaatcttaccagtgctg

SEQ ID NO: 5810 - RNA, 20 nt, synthetic construct
  source 1..20: mol_type = other RNA
gttcatgtcttcttacttga

SEQ ID NO: 5811 - RNA, 20 nt, synthetic construct
  source 1..20: mol_type = other RNA
gttcctcatgtagaccttgt

SEQ ID NO: 5812 - RNA, 20 nt, synthetic construct
  source 1..20: mol_type = other RNA
gttctacactcatcttagtg

SEQ ID NO: 5813 - RNA, 20 nt, synthetic construct
  source 1..20: mol_type = other RNA
gttctatgttcttccgtcat

SEQ ID NO: 5814 - RNA, 20 nt, synthetic construct
  source 1..20: mol_type = other RNA
gttcttccgtcatattcctc

SEQ ID NO: 5815 - RNA, 20 nt, synthetic construct
  source 1..20: mol_type = other RNA
gttgaaagctccttttggat

SEQ ID NO: 5816 - RNA, 20 nt, synthetic construct
  source 1..20: mol_type = other RNA
gttgacatataaatgatcag

SEQ ID NO: 5817 - RNA, 20 nt, synthetic construct
  source 1..20: mol_type = other RNA
gttgaggagctacagacatt

SEQ ID NO: 5818 - RNA, 20 nt, synthetic construct
  source 1..20: mol_type = other RNA
gttgattgtcaggaagcatt

SEQ ID NO: 5819 - RNA, 20 nt, synthetic construct
  source 1..20: mol_type = other RNA
gttgcaagattgaccccgga

SEQ ID NO: 5820 - RNA, 20 nt, synthetic construct
  source 1..20: mol_type = other RNA
gttgcatttggtcaagattt

SEQ ID NO: 5821 - RNA, 20 nt, synthetic construct
  source 1..20: mol_type = other RNA
gttggacttgcctgaaataa

SEQ ID NO: 5822 - RNA, 20 nt, synthetic construct
  source 1..20: mol_type = other RNA
gttgtattcagtgagggtct

SEQ ID NO: 5823 - RNA, 20 nt, synthetic construct
  source 1..20: mol_type = other RNA
gttgtgacctgaggatttaa

SEQ ID NO: 5824 - RNA, 20 nt, synthetic construct
  source 1..20: mol_type = other RNA
gttgttgcaagattgacccc

SEQ ID NO: 5825 - RNA, 20 nt, synthetic construct
  source 1..20: mol_type = other RNA
gtttatgagccagacaaatg

SEQ ID NO: 5826 - RNA, 20 nt, synthetic construct
  source 1..20: mol_type = other RNA
gtttcaccgatggctcagga

SEQ ID NO: 5827 - RNA, 20 nt, synthetic construct
  source 1..20: mol_type = other RNA
gtttcattgatcacaaggcc

SEQ ID NO: 5828 - RNA, 20 nt, synthetic construct
  source 1..20: mol_type = other RNA
gttttcatttcacaaaaatg

SEQ ID NO: 5829 - RNA, 20 nt, synthetic construct
  source 1..20: mol_type = other RNA
gttttggggactcatttcat

SEQ ID NO: 5830 - RNA, 20 nt, synthetic construct
  source 1..20: mol_type = other RNA
gtttttcggcttatataagc

SEQ ID NO: 5831 - RNA, 20 nt, synthetic construct
  source 1..20: mol_type = other RNA
taaaaatcattgattgtcag

SEQ ID NO: 5832 - RNA, 20 nt, synthetic construct
  source 1..20: mol_type = other RNA
taaaaggtgtccttttcaat

SEQ ID NO: 5833 - RNA, 20 nt, synthetic construct
  source 1..20: mol_type = other RNA
taaacattaggtgagttgag

SEQ ID NO: 5834 - RNA, 20 nt, synthetic construct
  source 1..20: mol_type = other RNA
taaagagagaatgtagatat

SEQ ID NO: 5835 - RNA, 20 nt, synthetic construct
  source 1..20: mol_type = other RNA
taaagaggctgaaagaggcc

SEQ ID NO: 5836 - RNA, 20 nt, synthetic construct
  source 1..20: mol_type = other RNA
taaatactctcaggcactaa

SEQ ID NO: 5837 - RNA, 20 nt, synthetic construct
  source 1..20: mol_type = other RNA
taaatccaaaaggagctttc

SEQ ID NO: 5838 - RNA, 20 nt, synthetic construct
  source 1..20: mol_type = other RNA
taaatcctcaggtcacaacc

SEQ ID NO: 5839 - RNA, 20 nt, synthetic construct
  source 1..20: mol_type = other RNA
taaatgatcagcactggtaa

SEQ ID NO: 5840 - RNA, 20 nt, synthetic construct
  source 1..20: mol_type = other RNA
taaatgcatatcctgagcca

SEQ ID NO: 5841 - RNA, 20 nt, synthetic construct
  source 1..20: mol_type = other RNA
taacaaagaatcataatgga

SEQ ID NO: 5842 - RNA, 20 nt, synthetic construct
  source 1..20: mol_type = other RNA
taacacagcatgtgtatttc

SEQ ID NO: 5843 - RNA, 20 nt, synthetic construct
  source 1..20: mol_type = other RNA
taacagataagcaagagaga

SEQ ID NO: 5844 - RNA, 20 nt, synthetic construct
  source 1..20: mol_type = other RNA
taactcacctctcaaggtgg

SEQ ID NO: 5845 - RNA, 20 nt, synthetic construct
  source 1..20: mol_type = other RNA
taagaagacatgaaccaagt

SEQ ID NO: 5846 - RNA, 20 nt, synthetic construct
  source 1..20: mol_type = other RNA
taagaagaccctcactgaat

SEQ ID NO: 5847 - RNA, 20 nt, synthetic construct
  source 1..20: mol_type = other RNA
taagaagggtggccttgtga

SEQ ID NO: 5848 - RNA, 20 nt, synthetic construct
  source 1..20: mol_type = other RNA
taagagaagcactttgggat

SEQ ID NO: 5849 - RNA, 20 nt, synthetic construct
  source 1..20: mol_type = other RNA
taagatgagtgtagaacacc

SEQ ID NO: 5850 - RNA, 20 nt, synthetic construct
  source 1..20: mol_type = other RNA
taagattgaacactgccccc

SEQ ID NO: 5851 - RNA, 20 nt, synthetic construct
  source 1..20: mol_type = other RNA
taagcaagagagatgttttg

SEQ ID NO: 5852 - RNA, 20 nt, synthetic construct
  source 1..20: mol_type = other RNA
taagcactattagagttgat

SEQ ID NO: 5853 - RNA, 20 nt, synthetic construct
  source 1..20: mol_type = other RNA
taagccgaaaaacgtctgag

SEQ ID NO: 5854 - RNA, 20 nt, synthetic construct
  source 1..20: mol_type = other RNA
taagctaaagaggctgaaag

SEQ ID NO: 5855 - RNA, 20 nt, synthetic construct
  source 1..20: mol_type = other RNA
taagctctaagagaagcact

SEQ ID NO: 5856 - RNA, 20 nt, synthetic construct
  source 1..20: mol_type = other RNA
taagggatggaaaaggaaga

SEQ ID NO: 5857 - RNA, 20 nt, synthetic construct
  source 1..20: mol_type = other RNA
taagtatccccaggatctgg

SEQ ID NO: 5858 - RNA, 20 nt, synthetic construct
  source 1..20: mol_type = other RNA
taataagctaaagaggctga

SEQ ID NO: 5859 - RNA, 20 nt, synthetic construct
  source 1..20: mol_type = other RNA
taatggaaagaatcccaaag

SEQ ID NO: 5860 - RNA, 20 nt, synthetic construct
  source 1..20: mol_type = other RNA
taatgtttatgagccagaca

SEQ ID NO: 5861 - RNA, 20 nt, synthetic construct
  source 1..20: mol_type = other RNA
tacaaagtacagcccagttt

SEQ ID NO: 5862 - RNA, 20 nt, synthetic construct
  source 1..20: mol_type = other RNA
tacaacattctcggtgcctg

SEQ ID NO: 5863 - RNA, 20 nt, synthetic construct
  source 1..20: mol_type = other RNA
tacaattgcactggaaatac

SEQ ID NO: 5864 - RNA, 20 nt, synthetic construct
  source 1..20: mol_type = other RNA
tacacatgctgtgttaggaa

SEQ ID NO: 5865 - RNA, 20 nt, synthetic construct
  source 1..20: mol_type = other RNA
tacactcatcttagtgcctg

SEQ ID NO: 5866 - RNA, 20 nt, synthetic construct
  source 1..20: mol_type = other RNA
tacagacattttgaaccctg

SEQ ID NO: 5867 - RNA, 20 nt, synthetic construct
  source 1..20: mol_type = other RNA
tacagcccagtttcattgat

SEQ ID NO: 5868 - RNA, 20 nt, synthetic construct
  source 1..20: mol_type = other RNA
tacaggcaccgagaatgttg

SEQ ID NO: 5869 - RNA, 20 nt, synthetic construct
  source 1..20: mol_type = other RNA
tacatattaggaaaatatgg

SEQ ID NO: 5870 - RNA, 20 nt, synthetic construct
  source 1..20: mol_type = other RNA
tacatgaggaactctaagta

SEQ ID NO: 5871 - RNA, 20 nt, synthetic construct
  source 1..20: mol_type = other RNA
tacatgcatttgaggtcaag

SEQ ID NO: 5872 - RNA, 20 nt, synthetic construct
  source 1..20: mol_type = other RNA
tacatggttgtgacctgagg

SEQ ID NO: 5873 - RNA, 20 nt, synthetic construct
  source 1..20: mol_type = other RNA
tacatgttttcatttcacaa

SEQ ID NO: 5874 - RNA, 20 nt, synthetic construct
  source 1..20: mol_type = other RNA
tacattctctctttagtcat

SEQ ID NO: 5875 - RNA, 20 nt, synthetic construct
  source 1..20: mol_type = other RNA
taccaggtgttctacactca

SEQ ID NO: 5876 - RNA, 20 nt, synthetic construct
  source 1..20: mol_type = other RNA
taccagtgctgatcatttat

SEQ ID NO: 5877 - RNA, 20 nt, synthetic construct
  source 1..20: mol_type = other RNA
tacctcaagggggactgtct

SEQ ID NO: 5878 - RNA, 20 nt, synthetic construct
  source 1..20: mol_type = other RNA
tacctgggggcagtgttcaa

SEQ ID NO: 5879 - RNA, 20 nt, synthetic construct
  source 1..20: mol_type = other RNA
tacgttgacatataaatgat

SEQ ID NO: 5880 - RNA, 20 nt, synthetic construct
  source 1..20: mol_type = other RNA
tactaatgatgttttcctat

SEQ ID NO: 5881 - RNA, 20 nt, synthetic construct
  source 1..20: mol_type = other RNA
tactctcaggcactaagatg

SEQ ID NO: 5882 - RNA, 20 nt, synthetic construct
  source 1..20: mol_type = other RNA
tactgcactactgggcagat

SEQ ID NO: 5883 - RNA, 20 nt, synthetic construct
  source 1..20: mol_type = other RNA
tactgggcagatgtgggccc

SEQ ID NO: 5884 - RNA, 20 nt, synthetic construct
  source 1..20: mol_type = other RNA
tacttagagttcctcatgta

SEQ ID NO: 5885 - RNA, 20 nt, synthetic construct
  source 1..20: mol_type = other RNA
tacttcacaatatctacatt

SEQ ID NO: 5886 - RNA, 20 nt, synthetic construct
  source 1..20: mol_type = other RNA
tacttcactccagaaagcag

SEQ ID NO: 5887 - RNA, 20 nt, synthetic construct
  source 1..20: mol_type = other RNA
tacttccggggtcaatcttg

SEQ ID NO: 5888 - RNA, 20 nt, synthetic construct
  source 1..20: mol_type = other RNA
tacttgacctcaaatgcatg

SEQ ID NO: 5889 - RNA, 20 nt, synthetic construct
  source 1..20: mol_type = other RNA
tactttggaatatacaaagt

SEQ ID NO: 5890 - RNA, 20 nt, synthetic construct
  source 1..20: mol_type = other RNA
tactttgtatattccaaagt

SEQ ID NO: 5891 - RNA, 20 nt, synthetic construct
  source 1..20: mol_type = other RNA
tagaacacctggtagctgct

SEQ ID NO: 5892 - RNA, 20 nt, synthetic construct
  source 1..20: mol_type = other RNA
tagaactctgggctgccatg

SEQ ID NO: 5893 - RNA, 20 nt, synthetic construct
  source 1..20: mol_type = other RNA
tagaagtgaagatgctgcca

SEQ ID NO: 5894 - RNA, 20 nt, synthetic construct
  source 1..20: mol_type = other RNA
tagaccttgtggctcagggg

SEQ ID NO: 5895 - RNA, 20 nt, synthetic construct
  source 1..20: mol_type = other RNA
tagagcttatataagccgaa

SEQ ID NO: 5896 - RNA, 20 nt, synthetic construct
  source 1..20: mol_type = other RNA
tagaggcttgcataataagc

SEQ ID NO: 5897 - RNA, 20 nt, synthetic construct
  source 1..20: mol_type = other RNA
tagagttcctcatgtagacc

SEQ ID NO: 5898 - RNA, 20 nt, synthetic construct
  source 1..20: mol_type = other RNA
tagagttgattgtcaggaag

SEQ ID NO: 5899 - RNA, 20 nt, synthetic construct
  source 1..20: mol_type = other RNA
tagatattgtgaagtacata

SEQ ID NO: 5900 - RNA, 20 nt, synthetic construct
  source 1..20: mol_type = other RNA
tagatgtgcatttttgtgaa

SEQ ID NO: 5901 - RNA, 20 nt, synthetic construct
  source 1..20: mol_type = other RNA
tagcaaggcccaccttgaga

SEQ ID NO: 5902 - RNA, 20 nt, synthetic construct
  source 1..20: mol_type = other RNA
tagctcatcatcttcccctc

SEQ ID NO: 5903 - RNA, 20 nt, synthetic construct
  source 1..20: mol_type = other RNA
tagctcctcaactcacctaa

SEQ ID NO: 5904 - RNA, 20 nt, synthetic construct
  source 1..20: mol_type = other RNA
tagctgacaatcaatgattt

SEQ ID NO: 5905 - RNA, 20 nt, synthetic construct
  source 1..20: mol_type = other RNA
tagctgctgcgggcccacat

SEQ ID NO: 5906 - RNA, 20 nt, synthetic construct
  source 1..20: mol_type = other RNA
tagctgctttttcatgcttc

SEQ ID NO: 5907 - RNA, 20 nt, synthetic construct
  source 1..20: mol_type = other RNA
tagcttattatgcaagcctc

SEQ ID NO: 5908 - RNA, 20 nt, synthetic construct
  source 1..20: mol_type = other RNA
taggaaaacatcattagtag

SEQ ID NO: 5909 - RNA, 20 nt, synthetic construct
  source 1..20: mol_type = other RNA
taggaaaatatgggttgcat

SEQ ID NO: 5910 - RNA, 20 nt, synthetic construct
  source 1..20: mol_type = other RNA
taggaatgaaatgagtcccc

SEQ ID NO: 5911 - RNA, 20 nt, synthetic construct
  source 1..20: mol_type = other RNA
taggcagattgaaaaggaca

SEQ ID NO: 5912 - RNA, 20 nt, synthetic construct
  source 1..20: mol_type = other RNA
taggtgagttgaggagctac

SEQ ID NO: 5913 - RNA, 20 nt, synthetic construct
  source 1..20: mol_type = other RNA
taggtgtcttcccattccag

SEQ ID NO: 5914 - RNA, 20 nt, synthetic construct
  source 1..20: mol_type = other RNA
tagtagctgacaatcaatga

SEQ ID NO: 5915 - RNA, 20 nt, synthetic construct
  source 1..20: mol_type = other RNA
tagtcttccttttccatccc

SEQ ID NO: 5916 - RNA, 20 nt, synthetic construct
  source 1..20: mol_type = other RNA
tagtgcagtagctcatcatc

SEQ ID NO: 5917 - RNA, 20 nt, synthetic construct
  source 1..20: mol_type = other RNA
tagtgcctgagagtatttag

SEQ ID NO: 5918 - RNA, 20 nt, synthetic construct
  source 1..20: mol_type = other RNA
tagtgcttaaaaatcattga

SEQ ID NO: 5919 - RNA, 20 nt, synthetic construct
  source 1..20: mol_type = other RNA
tagtttcaccgatggctcag

SEQ ID NO: 5920 - RNA, 20 nt, synthetic construct
  source 1..20: mol_type = other RNA
tataaatgatcagcactggt

SEQ ID NO: 5921 - RNA, 20 nt, synthetic construct
  source 1..20: mol_type = other RNA
tataagaagggtggccttgt

SEQ ID NO: 5922 - RNA, 20 nt, synthetic construct
  source 1..20: mol_type = other RNA
tataagccgaaaaacgtctg

SEQ ID NO: 5923 - RNA, 20 nt, synthetic construct
  source 1..20: mol_type = other RNA
tataagctctaagagaagca

SEQ ID NO: 5924 - RNA, 20 nt, synthetic construct
  source 1..20: mol_type = other RNA
tatacaaagtacagcccagt

SEQ ID NO: 5925 - RNA, 20 nt, synthetic construct
  source 1..20: mol_type = other RNA
tatacttcactccagaaagc

SEQ ID NO: 5926 - RNA, 20 nt, synthetic construct
  source 1..20: mol_type = other RNA
tatacttccggggtcaatct

SEQ ID NO: 5927 - RNA, 20 nt, synthetic construct
  source 1..20: mol_type = other RNA
tataggaaaacatcattagt

SEQ ID NO: 5928 - RNA, 20 nt, synthetic construct
  source 1..20: mol_type = other RNA
tatataagccgaaaaacgtc

SEQ ID NO: 5929 - RNA, 20 nt, synthetic construct
  source 1..20: mol_type = other RNA
tatataagctctaagagaag

SEQ ID NO: 5930 - RNA, 20 nt, synthetic construct
  source 1..20: mol_type = other RNA
tatatgtcaacgtatctgag

SEQ ID NO: 5931 - RNA, 20 nt, synthetic construct
  source 1..20: mol_type = other RNA
tatattccaaagtatacttc

SEQ ID NO: 5932 - RNA, 20 nt, synthetic construct
  source 1..20: mol_type = other RNA
tatccccaggatctggtgat

SEQ ID NO: 5933 - RNA, 20 nt, synthetic construct
  source 1..20: mol_type = other RNA
tatcctgagccatcggtgaa

SEQ ID NO: 5934 - RNA, 20 nt, synthetic construct
  source 1..20: mol_type = other RNA
tatctacattctctctttag

SEQ ID NO: 5935 - RNA, 20 nt, synthetic construct
  source 1..20: mol_type = other RNA
tatctgaaagacagtccccc

SEQ ID NO: 5936 - RNA, 20 nt, synthetic construct
  source 1..20: mol_type = other RNA
tatctgagctctctctggtc

SEQ ID NO: 5937 - RNA, 20 nt, synthetic construct
  source 1..20: mol_type = other RNA
tatctgttagtttcaccgat

SEQ ID NO: 5938 - RNA, 20 nt, synthetic construct
  source 1..20: mol_type = other RNA
tatgacggaagaacatagaa

SEQ ID NO: 5939 - RNA, 20 nt, synthetic construct
  source 1..20: mol_type = other RNA
tatgactaaagagagaatgt

SEQ ID NO: 5940 - RNA, 20 nt, synthetic construct
  source 1..20: mol_type = other RNA
tatgagccagacaaatggag

SEQ ID NO: 5941 - RNA, 20 nt, synthetic construct
  source 1..20: mol_type = other RNA
tatgattctttgttacaggc

SEQ ID NO: 5942 - RNA, 20 nt, synthetic construct
  source 1..20: mol_type = other RNA
tatgcaagcctctagtcttc

SEQ ID NO: 5943 - RNA, 20 nt, synthetic construct
  source 1..20: mol_type = other RNA
tatgcatttagaagtgaaga

SEQ ID NO: 5944 - RNA, 20 nt, synthetic construct
  source 1..20: mol_type = other RNA
tatggaattgtcctgctttc

SEQ ID NO: 5945 - RNA, 20 nt, synthetic construct
  source 1..20: mol_type = other RNA
tatgggttgcatttggtcaa

SEQ ID NO: 5946 - RNA, 20 nt, synthetic construct
  source 1..20: mol_type = other RNA
tatgtacttcacaatatcta

SEQ ID NO: 5947 - RNA, 20 nt, synthetic construct
  source 1..20: mol_type = other RNA
tatgtagatgtgcatttttg

SEQ ID NO: 5948 - RNA, 20 nt, synthetic construct
  source 1..20: mol_type = other RNA
tatgtcaacgtatctgagct

SEQ ID NO: 5949 - RNA, 20 nt, synthetic construct
  source 1..20: mol_type = other RNA
tatgttcttccgtcatattc

SEQ ID NO: 5950 - RNA, 20 nt, synthetic construct
  source 1..20: mol_type = other RNA
tattagagttgattgtcagg

SEQ ID NO: 5951 - RNA, 20 nt, synthetic construct
  source 1..20: mol_type = other RNA
tattaggaaaatatgggttg

SEQ ID NO: 5952 - RNA, 20 nt, synthetic construct
  source 1..20: mol_type = other RNA
tattatgcaagcctctagtc

SEQ ID NO: 5953 - RNA, 20 nt, synthetic construct
  source 1..20: mol_type = other RNA
tattcagtgagggtcttctt

SEQ ID NO: 5954 - RNA, 20 nt, synthetic construct
  source 1..20: mol_type = other RNA
tattccaaagtatacttccg

SEQ ID NO: 5955 - RNA, 20 nt, synthetic construct
  source 1..20: mol_type = other RNA
tattcctccatttgtctggc

SEQ ID NO: 5956 - RNA, 20 nt, synthetic construct
  source 1..20: mol_type = other RNA
tattccttgttgaaagctcc

SEQ ID NO: 5957 - RNA, 20 nt, synthetic construct
  source 1..20: mol_type = other RNA
tattgtgaagtacatattag

SEQ ID NO: 5958 - RNA, 20 nt, synthetic construct
  source 1..20: mol_type = other RNA
tatttaggcagattgaaaag

SEQ ID NO: 5959 - RNA, 20 nt, synthetic construct
  source 1..20: mol_type = other RNA
tatttatgtagatgtgcatt

SEQ ID NO: 5960 - RNA, 20 nt, synthetic construct
  source 1..20: mol_type = other RNA
tatttcaggcaagtccaact

SEQ ID NO: 5961 - RNA, 20 nt, synthetic construct
  source 1..20: mol_type = other RNA
tatttccagtgcaattgtag

SEQ ID NO: 5962 - RNA, 20 nt, synthetic construct
  source 1..20: mol_type = other RNA
tcaaaatcttgaccaaatgc

SEQ ID NO: 5963 - RNA, 20 nt, synthetic construct
  source 1..20: mol_type = other RNA
tcaaaatgtctgtagctcct

SEQ ID NO: 5964 - RNA, 20 nt, synthetic construct
  source 1..20: mol_type = other RNA
tcaaaattgaccagagagag

SEQ ID NO: 5965 - RNA, 20 nt, synthetic construct
  source 1..20: mol_type = other RNA
tcaaatgcatgtaagaagac

SEQ ID NO: 5966 - RNA, 20 nt, synthetic construct
  source 1..20: mol_type = other RNA
tcaacgtatctgagctctct

SEQ ID NO: 5967 - RNA, 20 nt, synthetic construct
  source 1..20: mol_type = other RNA
tcaactcacctaatgtttat

SEQ ID NO: 5968 - RNA, 20 nt, synthetic construct
  source 1..20: mol_type = other RNA
tcaactctaatagtgcttaa

SEQ ID NO: 5969 - RNA, 20 nt, synthetic construct
  source 1..20: mol_type = other RNA
tcaagattttgaatgcttcc

SEQ ID NO: 5970 - RNA, 20 nt, synthetic construct
  source 1..20: mol_type = other RNA
tcaagggggactgtctttca

SEQ ID NO: 5971 - RNA, 20 nt, synthetic construct
  source 1..20: mol_type = other RNA
tcaaggtccacttggttcat

SEQ ID NO: 5972 - RNA, 20 nt, synthetic construct
  source 1..20: mol_type = other RNA
tcaaggtccatgcctctgga

SEQ ID NO: 5973 - RNA, 20 nt, synthetic construct
  source 1..20: mol_type = other RNA
tcaaggtgggccttgctacc

SEQ ID NO: 5974 - RNA, 20 nt, synthetic construct
  source 1..20: mol_type = other RNA
tcaagtaagaagacatgaac

SEQ ID NO: 5975 - RNA, 20 nt, synthetic construct
  source 1..20: mol_type = other RNA
tcaatctgcctaaatactct

SEQ ID NO: 5976 - RNA, 20 nt, synthetic construct
  source 1..20: mol_type = other RNA
tcaatcttaccagtgctgat

SEQ ID NO: 5977 - RNA, 20 nt, synthetic construct
  source 1..20: mol_type = other RNA
tcaatcttgcaacaacctgc

SEQ ID NO: 5978 - RNA, 20 nt, synthetic construct
  source 1..20: mol_type = other RNA
tcaatgaaactgggctgtac

SEQ ID NO: 5979 - RNA, 20 nt, synthetic construct
  source 1..20: mol_type = other RNA
tcaatgatttttaagcacta

SEQ ID NO: 5980 - RNA, 20 nt, synthetic construct
  source 1..20: mol_type = other RNA
tcaattttgaggaatctcag

SEQ ID NO: 5981 - RNA, 20 nt, synthetic construct
  source 1..20: mol_type = other RNA
tcacaaaaatgcacatctac

SEQ ID NO: 5982 - RNA, 20 nt, synthetic construct
  source 1..20: mol_type = other RNA
tcacaaccatgtatctgaaa

SEQ ID NO: 5983 - RNA, 20 nt, synthetic construct
  source 1..20: mol_type = other RNA
tcacaaggccacccttctta

SEQ ID NO: 5984 - RNA, 20 nt, synthetic construct
  source 1..20: mol_type = other RNA
tcacaatatctacattctct

SEQ ID NO: 5985 - RNA, 20 nt, synthetic construct
  source 1..20: mol_type = other RNA
tcacatggcagcccagagtt

SEQ ID NO: 5986 - RNA, 20 nt, synthetic construct
  source 1..20: mol_type = other RNA
tcaccagatcctggggatac

SEQ ID NO: 5987 - RNA, 20 nt, synthetic construct
  source 1..20: mol_type = other RNA
tcaccgatggctcaggatat

SEQ ID NO: 5988 - RNA, 20 nt, synthetic construct
  source 1..20: mol_type = other RNA
tcacctaatgtttatgagcc

SEQ ID NO: 5989 - RNA, 20 nt, synthetic construct
  source 1..20: mol_type = other RNA
tcacctctcaaggtgggcct

SEQ ID NO: 5990 - RNA, 20 nt, synthetic construct
  source 1..20: mol_type = other RNA
tcactccagaaagcaggaca

SEQ ID NO: 5991 - RNA, 20 nt, synthetic construct
  source 1..20: mol_type = other RNA
tcactgaatacaacattctc

SEQ ID NO: 5992 - RNA, 20 nt, synthetic construct
  source 1..20: mol_type = other RNA
tcacttctaaatgcatatcc

SEQ ID NO: 5993 - RNA, 20 nt, synthetic construct
  source 1..20: mol_type = other RNA
tcagacgtttttcggcttat

SEQ ID NO: 5994 - RNA, 20 nt, synthetic construct
  source 1..20: mol_type = other RNA
tcagatacatggttgtgacc

SEQ ID NO: 5995 - RNA, 20 nt, synthetic construct
  source 1..20: mol_type = other RNA
tcagatacgttgacatataa

SEQ ID NO: 5996 - RNA, 20 nt, synthetic construct
  source 1..20: mol_type = other RNA
tcagcactggtaagattgaa

SEQ ID NO: 5997 - RNA, 20 nt, synthetic construct
  source 1..20: mol_type = other RNA
tcagcctctttagcttatta

SEQ ID NO: 5998 - RNA, 20 nt, synthetic construct
  source 1..20: mol_type = other RNA
tcagctactaatgatgtttt

SEQ ID NO: 5999 - RNA, 20 nt, synthetic construct
  source 1..20: mol_type = other RNA
tcaggaagcattcaaaatct

SEQ ID NO: 6000 - RNA, 20 nt, synthetic construct
  source 1..20: mol_type = other RNA
tcaggatatgcatttagaag

SEQ ID NO: 6001 - RNA, 20 nt, synthetic construct
  source 1..20: mol_type = other RNA
tcaggcaagtccaactcaag

SEQ ID NO: 6002 - RNA, 20 nt, synthetic construct
  source 1..20: mol_type = other RNA
tcaggcactaagatgagtgt

SEQ ID NO: 6003 - RNA, 20 nt, synthetic construct
  source 1..20: mol_type = other RNA
tcaggggcaggttgttgcaa

SEQ ID NO: 6004 - RNA, 20 nt, synthetic construct
  source 1..20: mol_type = other RNA
tcaggtcacaaccatgtatc

SEQ ID NO: 6005 - RNA, 20 nt, synthetic construct
  source 1..20: mol_type = other RNA
tcagtgagggtcttcttaca

SEQ ID NO: 6006 - RNA, 20 nt, synthetic construct
  source 1..20: mol_type = other RNA
tcataaacattaggtgagtt

SEQ ID NO: 6007 - RNA, 20 nt, synthetic construct
  source 1..20: mol_type = other RNA
tcataatggaaagaatccca

SEQ ID NO: 6008 - RNA, 20 nt, synthetic construct
  source 1..20: mol_type = other RNA
tcatattcctccatttgtct

SEQ ID NO: 6009 - RNA, 20 nt, synthetic construct
  source 1..20: mol_type = other RNA
tcatcaccagatcctgggga

SEQ ID NO: 6010 - RNA, 20 nt, synthetic construct
  source 1..20: mol_type = other RNA
tcatcatcttcccctccatc

SEQ ID NO: 6011 - RNA, 20 nt, synthetic construct
  source 1..20: mol_type = other RNA
tcatcttagtgcctgagagt

SEQ ID NO: 6012 - RNA, 20 nt, synthetic construct
  source 1..20: mol_type = other RNA
tcatcttcccctccatcatc

SEQ ID NO: 6013 - RNA, 20 nt, synthetic construct
  source 1..20: mol_type = other RNA
tcatgcttctccctcttcac

SEQ ID NO: 6014 - RNA, 20 nt, synthetic construct
  source 1..20: mol_type = other RNA
tcatgtagaccttgtggctc

SEQ ID NO: 6015 - RNA, 20 nt, synthetic construct
  source 1..20: mol_type = other RNA
tcatgtcttcttacttgacc

SEQ ID NO: 6016 - RNA, 20 nt, synthetic construct
  source 1..20: mol_type = other RNA
tcattagtagctgacaatca

SEQ ID NO: 6017 - RNA, 20 nt, synthetic construct
  source 1..20: mol_type = other RNA
tcattcctaacacagcatgt

SEQ ID NO: 6018 - RNA, 20 nt, synthetic construct
  source 1..20: mol_type = other RNA
tcattgatcacaaggccacc

SEQ ID NO: 6019 - RNA, 20 nt, synthetic construct
  source 1..20: mol_type = other RNA
tcattgattgtcagctacta

SEQ ID NO: 6020 - RNA, 20 nt, synthetic construct
  source 1..20: mol_type = other RNA
tcatttatatgtcaacgtat

SEQ ID NO: 6021 - RNA, 20 nt, synthetic construct
  source 1..20: mol_type = other RNA
tcatttcacaaaaatgcaca

SEQ ID NO: 6022 - RNA, 20 nt, synthetic construct
  source 1..20: mol_type = other RNA
tcatttcattcctaacacag

SEQ ID NO: 6023 - RNA, 20 nt, synthetic construct
  source 1..20: mol_type = other RNA
tccaaaaggagctttcaaca

SEQ ID NO: 6024 - RNA, 20 nt, synthetic construct
  source 1..20: mol_type = other RNA
tccaaagtatacttccgggg

SEQ ID NO: 6025 - RNA, 20 nt, synthetic construct
  source 1..20: mol_type = other RNA
tccaactcaaggtccatgcc

SEQ ID NO: 6026 - RNA, 20 nt, synthetic construct
  source 1..20: mol_type = other RNA
tccacttggttcatgtcttc

SEQ ID NO: 6027 - RNA, 20 nt, synthetic construct
  source 1..20: mol_type = other RNA
tccagaaagcaggacaattc

SEQ ID NO: 6028 - RNA, 20 nt, synthetic construct
  source 1..20: mol_type = other RNA
tccagaggcatggaccttga

SEQ ID NO: 6029 - RNA, 20 nt, synthetic construct
  source 1..20: mol_type = other RNA
tccagtgcaattgtaggggt

SEQ ID NO: 6030 - RNA, 20 nt, synthetic construct
  source 1..20: mol_type = other RNA
tccataggtgtcttcccatt

SEQ ID NO: 6031 - RNA, 20 nt, synthetic construct
  source 1..20: mol_type = other RNA
tccatcatcaccagatcctg

SEQ ID NO: 6032 - RNA, 20 nt, synthetic construct
  source 1..20: mol_type = other RNA
tccatcccttaaatcctcag

SEQ ID NO: 6033 - RNA, 20 nt, synthetic construct
  source 1..20: mol_type = other RNA
tccatgcctctggaatggga

SEQ ID NO: 6034 - RNA, 20 nt, synthetic construct
  source 1..20: mol_type = other RNA
tccattatgattctttgtta

SEQ ID NO: 6035 - RNA, 20 nt, synthetic construct
  source 1..20: mol_type = other RNA
tccatttgtctggctcataa

SEQ ID NO: 6036 - RNA, 20 nt, synthetic construct
  source 1..20: mol_type = other RNA
tcccaaagtgcttctcttag

SEQ ID NO: 6037 - RNA, 20 nt, synthetic construct
  source 1..20: mol_type = other RNA
tcccattccagaggcatgga

SEQ ID NO: 6038 - RNA, 20 nt, synthetic construct
  source 1..20: mol_type = other RNA
tccccaaaacatctctcttg

SEQ ID NO: 6039 - RNA, 20 nt, synthetic construct
  source 1..20: mol_type = other RNA
tccccaggatctggtgatga

SEQ ID NO: 6040 - RNA, 20 nt, synthetic construct
  source 1..20: mol_type = other RNA
tcccccttgaggtagcaagg

SEQ ID NO: 6041 - RNA, 20 nt, synthetic construct
  source 1..20: mol_type = other RNA
tcccctccatcatcaccaga

SEQ ID NO: 6042 - RNA, 20 nt, synthetic construct
  source 1..20: mol_type = other RNA
tccctcttcacatggcagcc

SEQ ID NO: 6043 - RNA, 20 nt, synthetic construct
  source 1..20: mol_type = other RNA
tcccttaaatcctcaggtca

SEQ ID NO: 6044 - RNA, 20 nt, synthetic construct
  source 1..20: mol_type = other RNA
tccggggtcaatcttgcaac

SEQ ID NO: 6045 - RNA, 20 nt, synthetic construct
  source 1..20: mol_type = other RNA
tccgtcatattcctccattt

SEQ ID NO: 6046 - RNA, 20 nt, synthetic construct
  source 1..20: mol_type = other RNA
tcctaacacagcatgtgtat

SEQ ID NO: 6047 - RNA, 20 nt, synthetic construct
  source 1..20: mol_type = other RNA
tcctaatatgtacttcacaa

SEQ ID NO: 6048 - RNA, 20 nt, synthetic construct
  source 1..20: mol_type = other RNA
tcctcaaaattgaccagaga

SEQ ID NO: 6049 - RNA, 20 nt, synthetic construct
  source 1..20: mol_type = other RNA
tcctcaactcacctaatgtt

SEQ ID NO: 6050 - RNA, 20 nt, synthetic construct
  source 1..20: mol_type = other RNA
tcctcaggtcacaaccatgt

SEQ ID NO: 6051 - RNA, 20 nt, synthetic construct
  source 1..20: mol_type = other RNA
tcctcatgtagaccttgtgg

SEQ ID NO: 6052 - RNA, 20 nt, synthetic construct
  source 1..20: mol_type = other RNA
tcctccatttgtctggctca

SEQ ID NO: 6053 - RNA, 20 nt, synthetic construct
  source 1..20: mol_type = other RNA
tcctgacaatcaactctaat

SEQ ID NO: 6054 - RNA, 20 nt, synthetic construct
  source 1..20: mol_type = other RNA
tcctgagccatcggtgaaac

SEQ ID NO: 6055 - RNA, 20 nt, synthetic construct
  source 1..20: mol_type = other RNA
tcctgctttctggagtgaag

SEQ ID NO: 6056 - RNA, 20 nt, synthetic construct
  source 1..20: mol_type = other RNA
tcctggggatacttagagtt

SEQ ID NO: 6057 - RNA, 20 nt, synthetic construct
  source 1..20: mol_type = other RNA
tccttgttgaaagctccttt

SEQ ID NO: 6058 - RNA, 20 nt, synthetic construct
  source 1..20: mol_type = other RNA
tccttttcaatctgcctaaa

SEQ ID NO: 6059 - RNA, 20 nt, synthetic construct
  source 1..20: mol_type = other RNA
tccttttccatcccttaaat

SEQ ID NO: 6060 - RNA, 20 nt, synthetic construct
  source 1..20: mol_type = other RNA
tccttttggatttatttcag

SEQ ID NO: 6061 - RNA, 20 nt, synthetic construct
  source 1..20: mol_type = other RNA
tcggcttatataagctctaa

SEQ ID NO: 6062 - RNA, 20 nt, synthetic construct
  source 1..20: mol_type = other RNA
tcggtgaaactaacagataa

SEQ ID NO: 6063 - RNA, 20 nt, synthetic construct
  source 1..20: mol_type = other RNA
tcggtgcctgtaacaaagaa

SEQ ID NO: 6064 - RNA, 20 nt, synthetic construct
  source 1..20: mol_type = other RNA
tctaaatgcatatcctgagc

SEQ ID NO: 6065 - RNA, 20 nt, synthetic construct
  source 1..20: mol_type = other RNA
tctaagagaagcactttggg

SEQ ID NO: 6066 - RNA, 20 nt, synthetic construct
  source 1..20: mol_type = other RNA
tctaagtatccccaggatct

SEQ ID NO: 6067 - RNA, 20 nt, synthetic construct
  source 1..20: mol_type = other RNA
tctaatagtgcttaaaaatc

SEQ ID NO: 6068 - RNA, 20 nt, synthetic construct
  source 1..20: mol_type = other RNA
tctacactcatcttagtgcc

SEQ ID NO: 6069 - RNA, 20 nt, synthetic construct
  source 1..20: mol_type = other RNA
tctacatgaggaactctaag

SEQ ID NO: 6070 - RNA, 20 nt, synthetic construct
  source 1..20: mol_type = other RNA
tctacattctctctttagtc

SEQ ID NO: 6071 - RNA, 20 nt, synthetic construct
  source 1..20: mol_type = other RNA
tctagtcttccttttccatc

SEQ ID NO: 6072 - RNA, 20 nt, synthetic construct
  source 1..20: mol_type = other RNA
tctatgttcttccgtcatat

SEQ ID NO: 6073 - RNA, 20 nt, synthetic construct
  source 1..20: mol_type = other RNA
tctcaaggtccacttggttc

SEQ ID NO: 6074 - RNA, 20 nt, synthetic construct
  source 1..20: mol_type = other RNA
tctcaaggtgggccttgcta

SEQ ID NO: 6075 - RNA, 20 nt, synthetic construct
  source 1..20: mol_type = other RNA
tctcagacgtttttcggctt

SEQ ID NO: 6076 - RNA, 20 nt, synthetic construct
  source 1..20: mol_type = other RNA
tctcaggcactaagatgagt

SEQ ID NO: 6077 - RNA, 20 nt, synthetic construct
  source 1..20: mol_type = other RNA
tctccctcttcacatggcag

SEQ ID NO: 6078 - RNA, 20 nt, synthetic construct
  source 1..20: mol_type = other RNA
tctcggtgcctgtaacaaag

SEQ ID NO: 6079 - RNA, 20 nt, synthetic construct
  source 1..20: mol_type = other RNA
tctctctggtcaattttgag

SEQ ID NO: 6080 - RNA, 20 nt, synthetic construct
  source 1..20: mol_type = other RNA
tctctcttgcttatctgtta

SEQ ID NO: 6081 - RNA, 20 nt, synthetic construct
  source 1..20: mol_type = other RNA
tctctctttagtcatacaca

SEQ ID NO: 6082 - RNA, 20 nt, synthetic construct
  source 1..20: mol_type = other RNA
tctctggtcaattttgagga

SEQ ID NO: 6083 - RNA, 20 nt, synthetic construct
  source 1..20: mol_type = other RNA
tctcttagagcttatataag

SEQ ID NO: 6084 - RNA, 20 nt, synthetic construct
  source 1..20: mol_type = other RNA
tctcttgcttatctgttagt

SEQ ID NO: 6085 - RNA, 20 nt, synthetic construct
  source 1..20: mol_type = other RNA
tctctttagtcatacacaca

SEQ ID NO: 6086 - RNA, 20 nt, synthetic construct
  source 1..20: mol_type = other RNA
tctgaaagacagtccccctt

SEQ ID NO: 6087 - RNA, 20 nt, synthetic construct
  source 1..20: mol_type = other RNA
tctgagattcctcaaaattg

SEQ ID NO: 6088 - RNA, 20 nt, synthetic construct
  source 1..20: mol_type = other RNA
tctgagctctctctggtcaa

SEQ ID NO: 6089 - RNA, 20 nt, synthetic construct
  source 1..20: mol_type = other RNA
tctgcccagtagtgcagtag

SEQ ID NO: 6090 - RNA, 20 nt, synthetic construct
  source 1..20: mol_type = other RNA
tctgcctaaatactctcagg

SEQ ID NO: 6091 - RNA, 20 nt, synthetic construct
  source 1..20: mol_type = other RNA
tctggaatgggaagacacct

SEQ ID NO: 6092 - RNA, 20 nt, synthetic construct
  source 1..20: mol_type = other RNA
tctggagtgaagtataagaa

SEQ ID NO: 6093 - RNA, 20 nt, synthetic construct
  source 1..20: mol_type = other RNA
tctggctcataaacattagg

SEQ ID NO: 6094 - RNA, 20 nt, synthetic construct
  source 1..20: mol_type = other RNA
tctgggctgccatgtgaaga

SEQ ID NO: 6095 - RNA, 20 nt, synthetic construct
  source 1..20: mol_type = other RNA
tctggtcaattttgaggaat

SEQ ID NO: 6096 - RNA, 20 nt, synthetic construct
  source 1..20: mol_type = other RNA
tctggtgatgatggagggga

SEQ ID NO: 6097 - RNA, 20 nt, synthetic construct
  source 1..20: mol_type = other RNA
tctgtagctcctcaactcac

SEQ ID NO: 6098 - RNA, 20 nt, synthetic construct
  source 1..20: mol_type = other RNA
tctgttagtttcaccgatgg

SEQ ID NO: 6099 - RNA, 20 nt, synthetic construct
  source 1..20: mol_type = other RNA
tcttacatgcatttgaggtc

SEQ ID NO: 6100 - RNA, 20 nt, synthetic construct
  source 1..20: mol_type = other RNA
tcttaccagtgctgatcatt

SEQ ID NO: 6101 - RNA, 20 nt, synthetic construct
  source 1..20: mol_type = other RNA
tcttacttgacctcaaatgc

SEQ ID NO: 6102 - RNA, 20 nt, synthetic construct
  source 1..20: mol_type = other RNA
tcttagagcttatataagcc

SEQ ID NO: 6103 - RNA, 20 nt, synthetic construct
  source 1..20: mol_type = other RNA
tcttagtgcctgagagtatt

SEQ ID NO: 6104 - RNA, 20 nt, synthetic construct
  source 1..20: mol_type = other RNA
tcttatacttcactccagaa

SEQ ID NO: 6105 - RNA, 20 nt, synthetic construct
  source 1..20: mol_type = other RNA
tcttcacatggcagcccaga

SEQ ID NO: 6106 - RNA, 20 nt, synthetic construct
  source 1..20: mol_type = other RNA
tcttcacttctaaatgcata

SEQ ID NO: 6107 - RNA, 20 nt, synthetic construct
  source 1..20: mol_type = other RNA
tcttcccattccagaggcat

SEQ ID NO: 6108 - RNA, 20 nt, synthetic construct
  source 1..20: mol_type = other RNA
tcttcccctccatcatcacc

SEQ ID NO: 6109 - RNA, 20 nt, synthetic construct
  source 1..20: mol_type = other RNA
tcttccgtcatattcctcca

SEQ ID NO: 6110 - RNA, 20 nt, synthetic construct
  source 1..20: mol_type = other RNA
tcttccttttccatccctta

SEQ ID NO: 6111 - RNA, 20 nt, synthetic construct
  source 1..20: mol_type = other RNA
tcttcttacatgcatttgag

SEQ ID NO: 6112 - RNA, 20 nt, synthetic construct
  source 1..20: mol_type = other RNA
tcttcttacttgacctcaaa

SEQ ID NO: 6113 - RNA, 20 nt, synthetic construct
  source 1..20: mol_type = other RNA
tcttgaccaaatgcaaccca

SEQ ID NO: 6114 - RNA, 20 nt, synthetic construct
  source 1..20: mol_type = other RNA
tcttgcaacaacctgcccct

SEQ ID NO: 6115 - RNA, 20 nt, synthetic construct
  source 1..20: mol_type = other RNA
tcttgcttatctgttagttt

SEQ ID NO: 6116 - RNA, 20 nt, synthetic construct
  source 1..20: mol_type = other RNA
tctttagcttattatgcaag

SEQ ID NO: 6117 - RNA, 20 nt, synthetic construct
  source 1..20: mol_type = other RNA
tctttagtcatacacacaca

SEQ ID NO: 6118 - RNA, 20 nt, synthetic construct
  source 1..20: mol_type = other RNA
tctttcagatacatggttgt

SEQ ID NO: 6119 - RNA, 20 nt, synthetic construct
  source 1..20: mol_type = other RNA
tctttcagcctctttagctt

SEQ ID NO: 6120 - RNA, 20 nt, synthetic construct
  source 1..20: mol_type = other RNA
tctttccattatgattcttt

SEQ ID NO: 6121 - RNA, 20 nt, synthetic construct
  source 1..20: mol_type = other RNA
tctttgttacaggcaccgag

SEQ ID NO: 6122 - RNA, 20 nt, synthetic construct
  source 1..20: mol_type = other RNA
tgaaaaagcagctaccaggt

SEQ ID NO: 6123 - RNA, 20 nt, synthetic construct
  source 1..20: mol_type = other RNA
tgaaaaggacaccttttaac

SEQ ID NO: 6124 - RNA, 20 nt, synthetic construct
  source 1..20: mol_type = other RNA
tgaaactaacagataagcaa

SEQ ID NO: 6125 - RNA, 20 nt, synthetic construct
  source 1..20: mol_type = other RNA
tgaaactgggctgtactttg

SEQ ID NO: 6126 - RNA, 20 nt, synthetic construct
  source 1..20: mol_type = other RNA
tgaaagacagtcccccttga

SEQ ID NO: 6127 - RNA, 20 nt, synthetic construct
  source 1..20: mol_type = other RNA
tgaaagaggccaatgcccca

SEQ ID NO: 6128 - RNA, 20 nt, synthetic construct
  source 1..20: mol_type = other RNA
tgaaagctccttttggattt

SEQ ID NO: 6129 - RNA, 20 nt, synthetic construct
  source 1..20: mol_type = other RNA
tgaaataaatccaaaaggag

SEQ ID NO: 6130 - RNA, 20 nt, synthetic construct
  source 1..20: mol_type = other RNA
tgaaatgagtccccaaaaca

SEQ ID NO: 6131 - RNA, 20 nt, synthetic construct
  source 1..20: mol_type = other RNA
tgaacactgcccccaggtag

SEQ ID NO: 6132 - RNA, 20 nt, synthetic construct
  source 1..20: mol_type = other RNA
tgaaccaagtggaccttgag

SEQ ID NO: 6133 - RNA, 20 nt, synthetic construct
  source 1..20: mol_type = other RNA
tgaaccctgtggtctcaagg

SEQ ID NO: 6134 - RNA, 20 nt, synthetic construct
  source 1..20: mol_type = other RNA
tgaagagggagaagcatgaa

SEQ ID NO: 6135 - RNA, 20 nt, synthetic construct
  source 1..20: mol_type = other RNA
tgaagatgctgccagtgggg

SEQ ID NO: 6136 - RNA, 20 nt, synthetic construct
  source 1..20: mol_type = other RNA
tgaagtacatattaggaaaa

SEQ ID NO: 6137 - RNA, 20 nt, synthetic construct
  source 1..20: mol_type = other RNA
tgaagtataagaagggtggc

SEQ ID NO: 6138 - RNA, 20 nt, synthetic construct
  source 1..20: mol_type = other RNA
tgaatacaacattctcggtg

SEQ ID NO: 6139 - RNA, 20 nt, synthetic construct
  source 1..20: mol_type = other RNA
tgaatgcttcctgacaatca

SEQ ID NO: 6140 - RNA, 20 nt, synthetic construct
  source 1..20: mol_type = other RNA
tgacaatcaactctaatagt

SEQ ID NO: 6141 - RNA, 20 nt, synthetic construct
  source 1..20: mol_type = other RNA
tgacatataaatgatcagca

SEQ ID NO: 6142 - RNA, 20 nt, synthetic construct
  source 1..20: mol_type = other RNA
tgaccaaatgcaacccatat

SEQ ID NO: 6143 - RNA, 20 nt, synthetic construct
  source 1..20: mol_type = other RNA
tgaccagagagagctcagat

SEQ ID NO: 6144 - RNA, 20 nt, synthetic construct
  source 1..20: mol_type = other RNA
tgaccccggaagtatacttt

SEQ ID NO: 6145 - RNA, 20 nt, synthetic construct
  source 1..20: mol_type = other RNA
tgacctcaaatgcatgtaag

SEQ ID NO: 6146 - RNA, 20 nt, synthetic construct
  source 1..20: mol_type = other RNA
tgacctgaggatttaaggga

SEQ ID NO: 6147 - RNA, 20 nt, synthetic construct
  source 1..20: mol_type = other RNA
tgacggaagaacatagaact

SEQ ID NO: 6148 - RNA, 20 nt, synthetic construct
  source 1..20: mol_type = other RNA
tgactaaagagagaatgtag

SEQ ID NO: 6149 - RNA, 20 nt, synthetic construct
  source 1..20: mol_type = other RNA
tgactattccttgttgaaag

SEQ ID NO: 6150 - RNA, 20 nt, synthetic construct
  source 1..20: mol_type = other RNA
tgagaccacagggttcaaaa

SEQ ID NO: 6151 - RNA, 20 nt, synthetic construct
  source 1..20: mol_type = other RNA
tgagaggtgagttaaaaggt

SEQ ID NO: 6152 - RNA, 20 nt, synthetic construct
  source 1..20: mol_type = other RNA
tgagagtatttaggcagatt

SEQ ID NO: 6153 - RNA, 20 nt, synthetic construct
  source 1..20: mol_type = other RNA
tgagattcctcaaaattgac

SEQ ID NO: 6154 - RNA, 20 nt, synthetic construct
  source 1..20: mol_type = other RNA
tgagccacaaggtctacatg

SEQ ID NO: 6155 - RNA, 20 nt, synthetic construct
  source 1..20: mol_type = other RNA
tgagccagacaaatggagga

SEQ ID NO: 6156 - RNA, 20 nt, synthetic construct
  source 1..20: mol_type = other RNA
tgagccatcggtgaaactaa

SEQ ID NO: 6157 - RNA, 20 nt, synthetic construct
  source 1..20: mol_type = other RNA
tgagctactgcactactggg

SEQ ID NO: 6158 - RNA, 20 nt, synthetic construct
  source 1..20: mol_type = other RNA
tgagctctctctggtcaatt

SEQ ID NO: 6159 - RNA, 20 nt, synthetic construct
  source 1..20: mol_type = other RNA
tgaggaactctaagtatccc

SEQ ID NO: 6160 - RNA, 20 nt, synthetic construct
  source 1..20: mol_type = other RNA
tgaggaatctcagacgtttt

SEQ ID NO: 6161 - RNA, 20 nt, synthetic construct
  source 1..20: mol_type = other RNA
tgaggagctacagacatttt

SEQ ID NO: 6162 - RNA, 20 nt, synthetic construct
  source 1..20: mol_type = other RNA
tgaggatttaagggatggaa

SEQ ID NO: 6163 - RNA, 20 nt, synthetic construct
  source 1..20: mol_type = other RNA
tgagggtcttcttacatgca

SEQ ID NO: 6164 - RNA, 20 nt, synthetic construct
  source 1..20: mol_type = other RNA
tgaggtagcaaggcccacct

SEQ ID NO: 6165 - RNA, 20 nt, synthetic construct
  source 1..20: mol_type = other RNA
tgaggtcaagtaagaagaca

SEQ ID NO: 6166 - RNA, 20 nt, synthetic construct
  source 1..20: mol_type = other RNA
tgagtccccaaaacatctct

SEQ ID NO: 6167 - RNA, 20 nt, synthetic construct
  source 1..20: mol_type = other RNA
tgagtgtagaacacctggta

SEQ ID NO: 6168 - RNA, 20 nt, synthetic construct
  source 1..20: mol_type = other RNA
tgagttaaaaggtgtccttt

SEQ ID NO: 6169 - RNA, 20 nt, synthetic construct
  source 1..20: mol_type = other RNA
tgagttgaggagctacagac

SEQ ID NO: 6170 - RNA, 20 nt, synthetic construct
  source 1..20: mol_type = other RNA
tgagttggacttgcctgaaa

SEQ ID NO: 6171 - RNA, 20 nt, synthetic construct
  source 1..20: mol_type = other RNA
tgatcaatgaaactgggctg

SEQ ID NO: 6172 - RNA, 20 nt, synthetic construct
  source 1..20: mol_type = other RNA
tgatcacaaggccacccttc

SEQ ID NO: 6173 - RNA, 20 nt, synthetic construct
  source 1..20: mol_type = other RNA
tgatcagcactggtaagatt

SEQ ID NO: 6174 - RNA, 20 nt, synthetic construct
  source 1..20: mol_type = other RNA
tgatcatttatatgtcaacg

SEQ ID NO: 6175 - RNA, 20 nt, synthetic construct
  source 1..20: mol_type = other RNA
tgatgagctactgcactact

SEQ ID NO: 6176 - RNA, 20 nt, synthetic construct
  source 1..20: mol_type = other RNA
tgatgatggaggggaagatg

SEQ ID NO: 6177 - RNA, 20 nt, synthetic construct
  source 1..20: mol_type = other RNA
tgatggaggggaagatgatg

SEQ ID NO: 6178 - RNA, 20 nt, synthetic construct
  source 1..20: mol_type = other RNA
tgattctttgttacaggcac

SEQ ID NO: 6179 - RNA, 20 nt, synthetic construct
  source 1..20: mol_type = other RNA
tgattgtcagctactaatga

SEQ ID NO: 6180 - RNA, 20 nt, synthetic construct
  source 1..20: mol_type = other RNA
tgattgtcaggaagcattca

SEQ ID NO: 6181 - RNA, 20 nt, synthetic construct
  source 1..20: mol_type = other RNA
tgatttttaagcactattag

SEQ ID NO: 6182 - RNA, 20 nt, synthetic construct
  source 1..20: mol_type = other RNA
tgcaacaacctgcccctgag

SEQ ID NO: 6183 - RNA, 20 nt, synthetic construct
  source 1..20: mol_type = other RNA
tgcaacccatattttcctaa

SEQ ID NO: 6184 - RNA, 20 nt, synthetic construct
  source 1..20: mol_type = other RNA
tgcaagattgaccccggaag

SEQ ID NO: 6185 - RNA, 20 nt, synthetic construct
  source 1..20: mol_type = other RNA
tgcaagcctctagtcttcct

SEQ ID NO: 6186 - RNA, 20 nt, synthetic construct
  source 1..20: mol_type = other RNA
tgcaattgtaggggtgtgtg

SEQ ID NO: 6187 - RNA, 20 nt, synthetic construct
  source 1..20: mol_type = other RNA
tgcacatctacataaatatt

SEQ ID NO: 6188 - RNA, 20 nt, synthetic construct
  source 1..20: mol_type = other RNA
tgcactactgggcagatgtg

SEQ ID NO: 6189 - RNA, 20 nt, synthetic construct
  source 1..20: mol_type = other RNA
tgcactggaaatacacatgc

SEQ ID NO: 6190 - RNA, 20 nt, synthetic construct
  source 1..20: mol_type = other RNA
tgcagtagctcatcatcttc

SEQ ID NO: 6191 - RNA, 20 nt, synthetic construct
  source 1..20: mol_type = other RNA
tgcataataagctaaagagg

SEQ ID NO: 6192 - RNA, 20 nt, synthetic construct
  source 1..20: mol_type = other RNA
tgcatatcctgagccatcgg

SEQ ID NO: 6193 - RNA, 20 nt, synthetic construct
  source 1..20: mol_type = other RNA
tgcatgactattccttgttg

SEQ ID NO: 6194 - RNA, 20 nt, synthetic construct
  source 1..20: mol_type = other RNA
tgcatgtaagaagaccctca

SEQ ID NO: 6195 - RNA, 20 nt, synthetic construct
  source 1..20: mol_type = other RNA
tgcatttagaagtgaagatg

SEQ ID NO: 6196 - RNA, 20 nt, synthetic construct
  source 1..20: mol_type = other RNA
tgcatttgaggtcaagtaag

SEQ ID NO: 6197 - RNA, 20 nt, synthetic construct
  source 1..20: mol_type = other RNA
tgcatttggtcaagattttg

SEQ ID NO: 6198 - RNA, 20 nt, synthetic construct
  source 1..20: mol_type = other RNA
tgcatttttgtgaaatgaaa

SEQ ID NO: 6199 - RNA, 20 nt, synthetic construct
  source 1..20: mol_type = other RNA
tgccagtggggcattggcct

SEQ ID NO: 6200 - RNA, 20 nt, synthetic construct
  source 1..20: mol_type = other RNA
tgccatgtgaagagggagaa

SEQ ID NO: 6201 - RNA, 20 nt, synthetic construct
  source 1..20: mol_type = other RNA
tgcccagtagtgcagtagct

SEQ ID NO: 6202 - RNA, 20 nt, synthetic construct
  source 1..20: mol_type = other RNA
tgccccactggcagcatctt

SEQ ID NO: 6203 - RNA, 20 nt, synthetic construct
  source 1..20: mol_type = other RNA
tgcccccaggtagctgctgc

SEQ ID NO: 6204 - RNA, 20 nt, synthetic construct
  source 1..20: mol_type = other RNA
tgcccctgagccacaaggtc

SEQ ID NO: 6205 - RNA, 20 nt, synthetic construct
  source 1..20: mol_type = other RNA
tgcctaaatactctcaggca

SEQ ID NO: 6206 - RNA, 20 nt, synthetic construct
  source 1..20: mol_type = other RNA
tgcctctggaatgggaagac

SEQ ID NO: 6207 - RNA, 20 nt, synthetic construct
  source 1..20: mol_type = other RNA
tgcctgaaataaatccaaaa

SEQ ID NO: 6208 - RNA, 20 nt, synthetic construct
  source 1..20: mol_type = other RNA
tgcctgagagtatttaggca

SEQ ID NO: 6209 - RNA, 20 nt, synthetic construct
  source 1..20: mol_type = other RNA
tgcctgtaacaaagaatcat

SEQ ID NO: 6210 - RNA, 20 nt, synthetic construct
  source 1..20: mol_type = other RNA
tgcgggcccacatctgccca

SEQ ID NO: 6211 - RNA, 20 nt, synthetic construct
  source 1..20: mol_type = other RNA
tgctacctcaagggggactg

SEQ ID NO: 6212 - RNA, 20 nt, synthetic construct
  source 1..20: mol_type = other RNA
tgctgatcatttatatgtca

SEQ ID NO: 6213 - RNA, 20 nt, synthetic construct
  source 1..20: mol_type = other RNA
tgctgccagtggggcattgg

SEQ ID NO: 6214 - RNA, 20 nt, synthetic construct
  source 1..20: mol_type = other RNA
tgctgcgggcccacatctgc

SEQ ID NO: 6215 - RNA, 20 nt, synthetic construct
  source 1..20: mol_type = other RNA
tgctgtgttaggaatgaaat

SEQ ID NO: 6216 - RNA, 20 nt, synthetic construct
  source 1..20: mol_type = other RNA
tgcttaaaaatcattgattg

SEQ ID NO: 6217 - RNA, 20 nt, synthetic construct
  source 1..20: mol_type = other RNA
tgcttatctgttagtttcac

SEQ ID NO: 6218 - RNA, 20 nt, synthetic construct
  source 1..20: mol_type = other RNA
tgcttcctgacaatcaactc

SEQ ID NO: 6219 - RNA, 20 nt, synthetic construct
  source 1..20: mol_type = other RNA
tgcttctccctcttcacatg

SEQ ID NO: 6220 - RNA, 20 nt, synthetic construct
  source 1..20: mol_type = other RNA
tgcttctcttagagcttata

SEQ ID NO: 6221 - RNA, 20 nt, synthetic construct
  source 1..20: mol_type = other RNA
tgctttctggagtgaagtat

SEQ ID NO: 6222 - RNA, 20 nt, synthetic construct
  source 1..20: mol_type = other RNA
tgctttttcatgcttctccc

SEQ ID NO: 6223 - RNA, 20 nt, synthetic construct
  source 1..20: mol_type = other RNA
tggaaaaggaagactagagg

SEQ ID NO: 6224 - RNA, 20 nt, synthetic construct
  source 1..20: mol_type = other RNA
tggaaagaatcccaaagtgc

SEQ ID NO: 6225 - RNA, 20 nt, synthetic construct
  source 1..20: mol_type = other RNA
tggaaatacacatgctgtgt

SEQ ID NO: 6226 - RNA, 20 nt, synthetic construct
  source 1..20: mol_type = other RNA
tggaatatacaaagtacagc

SEQ ID NO: 6227 - RNA, 20 nt, synthetic construct
  source 1..20: mol_type = other RNA
tggaatgggaagacacctat

SEQ ID NO: 6228 - RNA, 20 nt, synthetic construct
  source 1..20: mol_type = other RNA
tggaattgtcctgctttctg

SEQ ID NO: 6229 - RNA, 20 nt, synthetic construct
  source 1..20: mol_type = other RNA
tggaccttgagaccacaggg

SEQ ID NO: 6230 - RNA, 20 nt, synthetic construct
  source 1..20: mol_type = other RNA
tggaccttgagttggacttg

SEQ ID NO: 6231 - RNA, 20 nt, synthetic construct
  source 1..20: mol_type = other RNA
tggacttgcctgaaataaat

SEQ ID NO: 6232 - RNA, 20 nt, synthetic construct
  source 1..20: mol_type = other RNA
tggaggaatatgacggaaga

SEQ ID NO: 6233 - RNA, 20 nt, synthetic construct
  source 1..20: mol_type = other RNA
tggaggggaagatgatgagc

SEQ ID NO: 6234 - RNA, 20 nt, synthetic construct
  source 1..20: mol_type = other RNA
tggagtgaagtataagaagg

SEQ ID NO: 6235 - RNA, 20 nt, synthetic construct
  source 1..20: mol_type = other RNA
tggatttatttcaggcaagt

SEQ ID NO: 6236 - RNA, 20 nt, synthetic construct
  source 1..20: mol_type = other RNA
tggcagcatcttcacttcta

SEQ ID NO: 6237 - RNA, 20 nt, synthetic construct
  source 1..20: mol_type = other RNA
tggcagcccagagttctatg

SEQ ID NO: 6238 - RNA, 20 nt, synthetic construct
  source 1..20: mol_type = other RNA
tggcctctttcagcctcttt

SEQ ID NO: 6239 - RNA, 20 nt, synthetic construct
  source 1..20: mol_type = other RNA
tggccttgtgatcaatgaaa

SEQ ID NO: 6240 - RNA, 20 nt, synthetic construct
  source 1..20: mol_type = other RNA
tggctcaggatatgcattta

SEQ ID NO: 6241 - RNA, 20 nt, synthetic construct
  source 1..20: mol_type = other RNA
tggctcaggggcaggttgtt

SEQ ID NO: 6242 - RNA, 20 nt, synthetic construct
  source 1..20: mol_type = other RNA
tggctcataaacattaggtg

SEQ ID NO: 6243 - RNA, 20 nt, synthetic construct
  source 1..20: mol_type = other RNA
tgggaagacacctatggaat

SEQ ID NO: 6244 - RNA, 20 nt, synthetic construct
  source 1..20: mol_type = other RNA
tgggattctttccattatga

SEQ ID NO: 6245 - RNA, 20 nt, synthetic construct
  source 1..20: mol_type = other RNA
tgggcagatgtgggcccgca

SEQ ID NO: 6246 - RNA, 20 nt, synthetic construct
  source 1..20: mol_type = other RNA
tgggcccgcagcagctacct

SEQ ID NO: 6247 - RNA, 20 nt, synthetic construct
  source 1..20: mol_type = other RNA
tgggccttgctacctcaagg

SEQ ID NO: 6248 - RNA, 20 nt, synthetic construct
  source 1..20: mol_type = other RNA
tgggctgccatgtgaagagg

SEQ ID NO: 6249 - RNA, 20 nt, synthetic construct
  source 1..20: mol_type = other RNA
tgggctgtactttgtatatt

SEQ ID NO: 6250 - RNA, 20 nt, synthetic construct
  source 1..20: mol_type = other RNA
tggggactcatttcattcct

SEQ ID NO: 6251 - RNA, 20 nt, synthetic construct
  source 1..20: mol_type = other RNA
tggggatacttagagttcct

SEQ ID NO: 6252 - RNA, 20 nt, synthetic construct
  source 1..20: mol_type = other RNA
tggggcattggcctctttca

SEQ ID NO: 6253 - RNA, 20 nt, synthetic construct
  source 1..20: mol_type = other RNA
tgggggcagtgttcaatctt

SEQ ID NO: 6254 - RNA, 20 nt, synthetic construct
  source 1..20: mol_type = other RNA
tgggttgcatttggtcaaga

SEQ ID NO: 6255 - RNA, 20 nt, synthetic construct
  source 1..20: mol_type = other RNA
tggtaagattgaacactgcc

SEQ ID NO: 6256 - RNA, 20 nt, synthetic construct
  source 1..20: mol_type = other RNA
tggtagctgctttttcatgc

SEQ ID NO: 6257 - RNA, 20 nt, synthetic construct
  source 1..20: mol_type = other RNA
tggtcaagattttgaatgct

SEQ ID NO: 6258 - RNA, 20 nt, synthetic construct
  source 1..20: mol_type = other RNA
tggtcaattttgaggaatct

SEQ ID NO: 6259 - RNA, 20 nt, synthetic construct
  source 1..20: mol_type = other RNA
tggtctcaaggtccacttgg

SEQ ID NO: 6260 - RNA, 20 nt, synthetic construct
  source 1..20: mol_type = other RNA
tggtgatgatggaggggaag

SEQ ID NO: 6261 - RNA, 20 nt, synthetic construct
  source 1..20: mol_type = other RNA
tggttcatgtcttcttactt

SEQ ID NO: 6262 - RNA, 20 nt, synthetic construct
  source 1..20: mol_type = other RNA
tggttgtgacctgaggattt

SEQ ID NO: 6263 - RNA, 20 nt, synthetic construct
  source 1..20: mol_type = other RNA
tgtaacaaagaatcataatg

SEQ ID NO: 6264 - RNA, 20 nt, synthetic construct
  source 1..20: mol_type = other RNA
tgtaagaagaccctcactga

SEQ ID NO: 6265 - RNA, 20 nt, synthetic construct
  source 1..20: mol_type = other RNA
tgtacttcacaatatctaca

SEQ ID NO: 6266 - RNA, 20 nt, synthetic construct
  source 1..20: mol_type = other RNA
tgtactttgtatattccaaa

SEQ ID NO: 6267 - RNA, 20 nt, synthetic construct
  source 1..20: mol_type = other RNA
tgtagaacacctggtagctg

SEQ ID NO: 6268 - RNA, 20 nt, synthetic construct
  source 1..20: mol_type = other RNA
tgtagaccttgtggctcagg

SEQ ID NO: 6269 - RNA, 20 nt, synthetic construct
  source 1..20: mol_type = other RNA
tgtagatattgtgaagtaca

SEQ ID NO: 6270 - RNA, 20 nt, synthetic construct
  source 1..20: mol_type = other RNA
tgtagatgtgcatttttgtg

SEQ ID NO: 6271 - RNA, 20 nt, synthetic construct
  source 1..20: mol_type = other RNA
tgtagctcctcaactcacct

SEQ ID NO: 6272 - RNA, 20 nt, synthetic construct
  source 1..20: mol_type = other RNA
tgtatattccaaagtatact

SEQ ID NO: 6273 - RNA, 20 nt, synthetic construct
  source 1..20: mol_type = other RNA
tgtatcctaacatatacttt

SEQ ID NO: 6274 - RNA, 20 nt, synthetic construct
  source 1..20: mol_type = other RNA
tgtatctgaaagacagtccc

SEQ ID NO: 6275 - RNA, 20 nt, synthetic construct
  source 1..20: mol_type = other RNA
tgtatgactaaagagagaat

SEQ ID NO: 6276 - RNA, 20 nt, synthetic construct
  source 1..20: mol_type = other RNA
tgtattcagtgagggtcttc

SEQ ID NO: 6277 - RNA, 20 nt, synthetic construct
  source 1..20: mol_type = other RNA
tgtatttccagtgcaattgt

SEQ ID NO: 6278 - RNA, 20 nt, synthetic construct
  source 1..20: mol_type = other RNA
tgtcaacgtatctgagctct

SEQ ID NO: 6279 - RNA, 20 nt, synthetic construct
  source 1..20: mol_type = other RNA
tgtcagctactaatgatgtt

SEQ ID NO: 6280 - RNA, 20 nt, synthetic construct
  source 1..20: mol_type = other RNA
tgtcaggaagcattcaaaat

SEQ ID NO: 6281 - RNA, 20 nt, synthetic construct
  source 1..20: mol_type = other RNA
tgtcctgctttctggagtga

SEQ ID NO: 6282 - RNA, 20 nt, synthetic construct
  source 1..20: mol_type = other RNA
tgtccttttcaatctgccta

SEQ ID NO: 6283 - RNA, 20 nt, synthetic construct
  source 1..20: mol_type = other RNA
tgtctggctcataaacatta

SEQ ID NO: 6284 - RNA, 20 nt, synthetic construct
  source 1..20: mol_type = other RNA
tgtctgtagctcctcaactc

SEQ ID NO: 6285 - RNA, 20 nt, synthetic construct
  source 1..20: mol_type = other RNA
tgtcttcccattccagaggc

SEQ ID NO: 6286 - RNA, 20 nt, synthetic construct
  source 1..20: mol_type = other RNA
tgtcttcttacttgacctca

SEQ ID NO: 6287 - RNA, 20 nt, synthetic construct
  source 1..20: mol_type = other RNA
tgtctttcagatacatggtt

SEQ ID NO: 6288 - RNA, 20 nt, synthetic construct
  source 1..20: mol_type = other RNA
tgtgaaatgaaaacatgtaa

SEQ ID NO: 6289 - RNA, 20 nt, synthetic construct
  source 1..20: mol_type = other RNA
tgtgaagagggagaagcatg

SEQ ID NO: 6290 - RNA, 20 nt, synthetic construct
  source 1..20: mol_type = other RNA
tgtgaagtacatattaggaa

SEQ ID NO: 6291 - RNA, 20 nt, synthetic construct
  source 1..20: mol_type = other RNA
tgtgacctgaggatttaagg

SEQ ID NO: 6292 - RNA, 20 nt, synthetic construct
  source 1..20: mol_type = other RNA
tgtgatcaatgaaactgggc

SEQ ID NO: 6293 - RNA, 20 nt, synthetic construct
  source 1..20: mol_type = other RNA
tgtgcatttttgtgaaatga

SEQ ID NO: 6294 - RNA, 20 nt, synthetic construct
  source 1..20: mol_type = other RNA
tgtggctcaggggcaggttg

SEQ ID NO: 6295 - RNA, 20 nt, synthetic construct
  source 1..20: mol_type = other RNA
tgtgggcccgcagcagctac

SEQ ID NO: 6296 - RNA, 20 nt, synthetic construct
  source 1..20: mol_type = other RNA
tgtggtctcaaggtccactt

SEQ ID NO: 6297 - RNA, 20 nt, synthetic construct
  source 1..20: mol_type = other RNA
tgtgtatgactaaagagaga

SEQ ID NO: 6298 - RNA, 20 nt, synthetic construct
  source 1..20: mol_type = other RNA
tgtgtatttccagtgcaatt

SEQ ID NO: 6299 - RNA, 20 nt, synthetic construct
  source 1..20: mol_type = other RNA
tgtgtgtatgactaaagaga

SEQ ID NO: 6300 - RNA, 20 nt, synthetic construct
  source 1..20: mol_type = other RNA
tgtgtgtgtatgactaaaga

SEQ ID NO: 6301 - RNA, 20 nt, synthetic construct
  source 1..20: mol_type = other RNA
tgtgtgtgtgtatgactaaa

SEQ ID NO: 6302 - RNA, 20 nt, synthetic construct
  source 1..20: mol_type = other RNA
tgtgttaggaatgaaatgag

SEQ ID NO: 6303 - RNA, 20 nt, synthetic construct
  source 1..20: mol_type = other RNA
tgttacaggcaccgagaatg

SEQ ID NO: 6304 - RNA, 20 nt, synthetic construct
  source 1..20: mol_type = other RNA
tgttaggaatgaaatgagtc

SEQ ID NO: 6305 - RNA, 20 nt, synthetic construct
  source 1..20: mol_type = other RNA
tgttagtttcaccgatggct

SEQ ID NO: 6306 - RNA, 20 nt, synthetic construct
  source 1..20: mol_type = other RNA
tgttcaatcttaccagtgct

SEQ ID NO: 6307 - RNA, 20 nt, synthetic construct
  source 1..20: mol_type = other RNA
tgttctacactcatcttagt

SEQ ID NO: 6308 - RNA, 20 nt, synthetic construct
  source 1..20: mol_type = other RNA
tgttcttccgtcatattcct

SEQ ID NO: 6309 - RNA, 20 nt, synthetic construct
  source 1..20: mol_type = other RNA
tgttgaaagctccttttgga

SEQ ID NO: 6310 - RNA, 20 nt, synthetic construct
  source 1..20: mol_type = other RNA
tgttgcaagattgaccccgg

SEQ ID NO: 6311 - RNA, 20 nt, synthetic construct
  source 1..20: mol_type = other RNA
tgttgtattcagtgagggtc

SEQ ID NO: 6312 - RNA, 20 nt, synthetic construct
  source 1..20: mol_type = other RNA
tgtttatgagccagacaaat

SEQ ID NO: 6313 - RNA, 20 nt, synthetic construct
  source 1..20: mol_type = other RNA
tgttttggggactcatttca

SEQ ID NO: 6314 - RNA, 20 nt, synthetic construct
  source 1..20: mol_type = other RNA
ttaaaaggtgtccttttcaa

SEQ ID NO: 6315 - RNA, 20 nt, synthetic construct
  source 1..20: mol_type = other RNA
ttaaatcctcaggtcacaac

SEQ ID NO: 6316 - RNA, 20 nt, synthetic construct
  source 1..20: mol_type = other RNA
ttaactcacctctcaaggtg

SEQ ID NO: 6317 - RNA, 20 nt, synthetic construct
  source 1..20: mol_type = other RNA
ttaagcactattagagttga

SEQ ID NO: 6318 - RNA, 20 nt, synthetic construct
  source 1..20: mol_type = other RNA
ttaagggatggaaaaggaag

SEQ ID NO: 6319 - RNA, 20 nt, synthetic construct
  source 1..20: mol_type = other RNA
ttacaggcaccgagaatgtt

SEQ ID NO: 6320 - RNA, 20 nt, synthetic construct
  source 1..20: mol_type = other RNA
ttacatgcatttgaggtcaa

SEQ ID NO: 6321 - RNA, 20 nt, synthetic construct
  source 1..20: mol_type = other RNA
ttacatgttttcatttcaca

SEQ ID NO: 6322 - RNA, 20 nt, synthetic construct
  source 1..20: mol_type = other RNA
ttaccagtgctgatcattta

SEQ ID NO: 6323 - RNA, 20 nt, synthetic construct
  source 1..20: mol_type = other RNA
ttacttgacctcaaatgcat

SEQ ID NO: 6324 - RNA, 20 nt, synthetic construct
  source 1..20: mol_type = other RNA
ttagaagtgaagatgctgcc

SEQ ID NO: 6325 - RNA, 20 nt, synthetic construct
  source 1..20: mol_type = other RNA
ttagagcttatataagccga

SEQ ID NO: 6326 - RNA, 20 nt, synthetic construct
  source 1..20: mol_type = other RNA
ttagagttcctcatgtagac

SEQ ID NO: 6327 - RNA, 20 nt, synthetic construct
  source 1..20: mol_type = other RNA
ttagagttgattgtcaggaa

SEQ ID NO: 6328 - RNA, 20 nt, synthetic construct
  source 1..20: mol_type = other RNA
ttagcttattatgcaagcct

SEQ ID NO: 6329 - RNA, 20 nt, synthetic construct
  source 1..20: mol_type = other RNA
ttaggaaaatatgggttgca

SEQ ID NO: 6330 - RNA, 20 nt, synthetic construct
  source 1..20: mol_type = other RNA
ttaggaatgaaatgagtccc

SEQ ID NO: 6331 - RNA, 20 nt, synthetic construct
  source 1..20: mol_type = other RNA
ttaggcagattgaaaaggac

SEQ ID NO: 6332 - RNA, 20 nt, synthetic construct
  source 1..20: mol_type = other RNA
ttaggtgagttgaggagcta

SEQ ID NO: 6333 - RNA, 20 nt, synthetic construct
  source 1..20: mol_type = other RNA
ttagtagctgacaatcaatg

SEQ ID NO: 6334 - RNA, 20 nt, synthetic construct
  source 1..20: mol_type = other RNA
ttagtgcctgagagtattta

SEQ ID NO: 6335 - RNA, 20 nt, synthetic construct
  source 1..20: mol_type = other RNA
ttagtttcaccgatggctca

SEQ ID NO: 6336 - RNA, 20 nt, synthetic construct
  source 1..20: mol_type = other RNA
ttatacttcactccagaaag

SEQ ID NO: 6337 - RNA, 20 nt, synthetic construct
  source 1..20: mol_type = other RNA
ttataggaaaacatcattag

SEQ ID NO: 6338 - RNA, 20 nt, synthetic construct
  source 1..20: mol_type = other RNA
ttatataagccgaaaaacgt

SEQ ID NO: 6339 - RNA, 20 nt, synthetic construct
  source 1..20: mol_type = other RNA
ttatataagctctaagagaa

SEQ ID NO: 6340 - RNA, 20 nt, synthetic construct
  source 1..20: mol_type = other RNA
ttatatgtcaacgtatctga

SEQ ID NO: 6341 - RNA, 20 nt, synthetic construct
  source 1..20: mol_type = other RNA
ttatctgttagtttcaccga

SEQ ID NO: 6342 - RNA, 20 nt, synthetic construct
  source 1..20: mol_type = other RNA
ttatgagccagacaaatgga

SEQ ID NO: 6343 - RNA, 20 nt, synthetic construct
  source 1..20: mol_type = other RNA
ttatgattctttgttacagg

SEQ ID NO: 6344 - RNA, 20 nt, synthetic construct
  source 1..20: mol_type = other RNA
ttatgcaagcctctagtctt

SEQ ID NO: 6345 - RNA, 20 nt, synthetic construct
  source 1..20: mol_type = other RNA
ttatgtagatgtgcattttt

SEQ ID NO: 6346 - RNA, 20 nt, synthetic construct
  source 1..20: mol_type = other RNA
ttattatgcaagcctctagt

SEQ ID NO: 6347 - RNA, 20 nt, synthetic construct
  source 1..20: mol_type = other RNA
ttatttcaggcaagtccaac

SEQ ID NO: 6348 - RNA, 20 nt, synthetic construct
  source 1..20: mol_type = other RNA
ttcaaaatcttgaccaaatg

SEQ ID NO: 6349 - RNA, 20 nt, synthetic construct
  source 1..20: mol_type = other RNA
ttcaaaatgtctgtagctcc

SEQ ID NO: 6350 - RNA, 20 nt, synthetic construct
  source 1..20: mol_type = other RNA
ttcaatctgcctaaatactc

SEQ ID NO: 6351 - RNA, 20 nt, synthetic construct
  source 1..20: mol_type = other RNA
ttcaatcttaccagtgctga

SEQ ID NO: 6352 - RNA, 20 nt, synthetic construct
  source 1..20: mol_type = other RNA
ttcacaaaaatgcacatcta

SEQ ID NO: 6353 - RNA, 20 nt, synthetic construct
  source 1..20: mol_type = other RNA
ttcacaatatctacattctc

SEQ ID NO: 6354 - RNA, 20 nt, synthetic construct
  source 1..20: mol_type = other RNA
ttcacatggcagcccagagt

SEQ ID NO: 6355 - RNA, 20 nt, synthetic construct
  source 1..20: mol_type = other RNA
ttcaccgatggctcaggata

SEQ ID NO: 6356 - RNA, 20 nt, synthetic construct
  source 1..20: mol_type = other RNA
ttcactccagaaagcaggac

SEQ ID NO: 6357 - RNA, 20 nt, synthetic construct
  source 1..20: mol_type = other RNA
ttcacttctaaatgcatatc

SEQ ID NO: 6358 - RNA, 20 nt, synthetic construct
  source 1..20: mol_type = other RNA
ttcagatacatggttgtgac

SEQ ID NO: 6359 - RNA, 20 nt, synthetic construct
  source 1..20: mol_type = other RNA
ttcagcctctttagcttatt

SEQ ID NO: 6360 - RNA, 20 nt, synthetic construct
  source 1..20: mol_type = other RNA
ttcaggcaagtccaactcaa

SEQ ID NO: 6361 - RNA, 20 nt, synthetic construct
  source 1..20: mol_type = other RNA
ttcagtgagggtcttcttac

SEQ ID NO: 6362 - RNA, 20 nt, synthetic construct
  source 1..20: mol_type = other RNA
ttcatgcttctccctcttca

SEQ ID NO: 6363 - RNA, 20 nt, synthetic construct
  source 1..20: mol_type = other RNA
ttcatgtcttcttacttgac

SEQ ID NO: 6364 - RNA, 20 nt, synthetic construct
  source 1..20: mol_type = other RNA
ttcattcctaacacagcatg

SEQ ID NO: 6365 - RNA, 20 nt, synthetic construct
  source 1..20: mol_type = other RNA
ttcattgatcacaaggccac

SEQ ID NO: 6366 - RNA, 20 nt, synthetic construct
  source 1..20: mol_type = other RNA
ttcatttcacaaaaatgcac

SEQ ID NO: 6367 - RNA, 20 nt, synthetic construct
  source 1..20: mol_type = other RNA
ttccaaagtatacttccggg

SEQ ID NO: 6368 - RNA, 20 nt, synthetic construct
  source 1..20: mol_type = other RNA
ttccagaggcatggaccttg

SEQ ID NO: 6369 - RNA, 20 nt, synthetic construct
  source 1..20: mol_type = other RNA
ttccagtgcaattgtagggg

SEQ ID NO: 6370 - RNA, 20 nt, synthetic construct
  source 1..20: mol_type = other RNA
ttccataggtgtcttcccat

SEQ ID NO: 6371 - RNA, 20 nt, synthetic construct
  source 1..20: mol_type = other RNA
ttccatcccttaaatcctca

SEQ ID NO: 6372 - RNA, 20 nt, synthetic construct
  source 1..20: mol_type = other RNA
ttccattatgattctttgtt

SEQ ID NO: 6373 - RNA, 20 nt, synthetic construct
  source 1..20: mol_type = other RNA
ttcccattccagaggcatgg

SEQ ID NO: 6374 - RNA, 20 nt, synthetic construct
  source 1..20: mol_type = other RNA
ttcccctccatcatcaccag

SEQ ID NO: 6375 - RNA, 20 nt, synthetic construct
  source 1..20: mol_type = other RNA
ttccggggtcaatcttgcaa

SEQ ID NO: 6376 - RNA, 20 nt, synthetic construct
  source 1..20: mol_type = other RNA
ttccgtcatattcctccatt

SEQ ID NO: 6377 - RNA, 20 nt, synthetic construct
  source 1..20: mol_type = other RNA
ttcctaacacagcatgtgta

SEQ ID NO: 6378 - RNA, 20 nt, synthetic construct
  source 1..20: mol_type = other RNA
ttcctaatatgtacttcaca

SEQ ID NO: 6379 - RNA, 20 nt, synthetic construct
  source 1..20: mol_type = other RNA
ttcctcaaaattgaccagag

SEQ ID NO: 6380 - RNA, 20 nt, synthetic construct
  source 1..20: mol_type = other RNA
ttcctcatgtagaccttgtg

SEQ ID NO: 6381 - RNA, 20 nt, synthetic construct
  source 1..20: mol_type = other RNA
ttcctccatttgtctggctc

SEQ ID NO: 6382 - RNA, 20 nt, synthetic construct
  source 1..20: mol_type = other RNA
ttcctgacaatcaactctaa

SEQ ID NO: 6383 - RNA, 20 nt, synthetic construct
  source 1..20: mol_type = other RNA
ttccttgttgaaagctcctt

SEQ ID NO: 6384 - RNA, 20 nt, synthetic construct
  source 1..20: mol_type = other RNA
ttccttttccatcccttaaa

SEQ ID NO: 6385 - RNA, 20 nt, synthetic construct
  source 1..20: mol_type = other RNA
ttcggcttatataagctcta

SEQ ID NO: 6386 - RNA, 20 nt, synthetic construct
  source 1..20: mol_type = other RNA
ttctaaatgcatatcctgag

SEQ ID NO: 6387 - RNA, 20 nt, synthetic construct
  source 1..20: mol_type = other RNA
ttctacactcatcttagtgc

SEQ ID NO: 6388 - RNA, 20 nt, synthetic construct
  source 1..20: mol_type = other RNA
ttctatgttcttccgtcata

SEQ ID NO: 6389 - RNA, 20 nt, synthetic construct
  source 1..20: mol_type = other RNA
ttctccctcttcacatggca

SEQ ID NO: 6390 - RNA, 20 nt, synthetic construct
  source 1..20: mol_type = other RNA
ttctcggtgcctgtaacaaa

SEQ ID NO: 6391 - RNA, 20 nt, synthetic construct
  source 1..20: mol_type = other RNA
ttctctctttagtcatacac

SEQ ID NO: 6392 - RNA, 20 nt, synthetic construct
  source 1..20: mol_type = other RNA
ttctcttagagcttatataa

SEQ ID NO: 6393 - RNA, 20 nt, synthetic construct
  source 1..20: mol_type = other RNA
ttctggagtgaagtataaga

SEQ ID NO: 6394 - RNA, 20 nt, synthetic construct
  source 1..20: mol_type = other RNA
ttcttacatgcatttgaggt

SEQ ID NO: 6395 - RNA, 20 nt, synthetic construct
  source 1..20: mol_type = other RNA
ttcttacttgacctcaaatg

SEQ ID NO: 6396 - RNA, 20 nt, synthetic construct
  source 1..20: mol_type = other RNA
ttcttatacttcactccaga

SEQ ID NO: 6397 - RNA, 20 nt, synthetic construct
  source 1..20: mol_type = other RNA
ttcttccgtcatattcctcc

SEQ ID NO: 6398 - RNA, 20 nt, synthetic construct
  source 1..20: mol_type = other RNA
ttctttccattatgattctt

SEQ ID NO: 6399 - RNA, 20 nt, synthetic construct
  source 1..20: mol_type = other RNA
ttctttgttacaggcaccga

SEQ ID NO: 6400 - RNA, 20 nt, synthetic construct
  source 1..20: mol_type = other RNA
ttgaaaaggacaccttttaa

SEQ ID NO: 6401 - RNA, 20 nt, synthetic construct
  source 1..20: mol_type = other RNA
ttgaaagctccttttggatt

SEQ ID NO: 6402 - RNA, 20 nt, synthetic construct
  source 1..20: mol_type = other RNA
ttgaacactgcccccaggta

SEQ ID NO: 6403 - RNA, 20 nt, synthetic construct
  source 1..20: mol_type = other RNA
ttgaaccctgtggtctcaag

SEQ ID NO: 6404 - RNA, 20 nt, synthetic construct
  source 1..20: mol_type = other RNA
ttgaatgcttcctgacaatc

SEQ ID NO: 6405 - RNA, 20 nt, synthetic construct
  source 1..20: mol_type = other RNA
ttgacatataaatgatcagc

SEQ ID NO: 6406 - RNA, 20 nt, synthetic construct
  source 1..20: mol_type = other RNA
ttgaccaaatgcaacccata

SEQ ID NO: 6407 - RNA, 20 nt, synthetic construct
  source 1..20: mol_type = other RNA
ttgaccagagagagctcaga

SEQ ID NO: 6408 - RNA, 20 nt, synthetic construct
  source 1..20: mol_type = other RNA
ttgaccccggaagtatactt

SEQ ID NO: 6409 - RNA, 20 nt, synthetic construct
  source 1..20: mol_type = other RNA
ttgacctcaaatgcatgtaa

SEQ ID NO: 6410 - RNA, 20 nt, synthetic construct
  source 1..20: mol_type = other RNA
ttgagaccacagggttcaaa

SEQ ID NO: 6411 - RNA, 20 nt, synthetic construct
  source 1..20: mol_type = other RNA
ttgagaggtgagttaaaagg

SEQ ID NO: 6412 - RNA, 20 nt, synthetic construct
  source 1..20: mol_type = other RNA
ttgaggaatctcagacgttt

SEQ ID NO: 6413 - RNA, 20 nt, synthetic construct
  source 1..20: mol_type = other RNA
ttgaggagctacagacattt

SEQ ID NO: 6414 - RNA, 20 nt, synthetic construct
  source 1..20: mol_type = other RNA
ttgaggtagcaaggcccacc

SEQ ID NO: 6415 - RNA, 20 nt, synthetic construct
  source 1..20: mol_type = other RNA
ttgaggtcaagtaagaagac

SEQ ID NO: 6416 - RNA, 20 nt, synthetic construct
  source 1..20: mol_type = other RNA
ttgagttggacttgcctgaa

SEQ ID NO: 6417 - RNA, 20 nt, synthetic construct
  source 1..20: mol_type = other RNA
ttgatcacaaggccaccctt

SEQ ID NO: 6418 - RNA, 20 nt, synthetic construct
  source 1..20: mol_type = other RNA
ttgattgtcagctactaatg

SEQ ID NO: 6419 - RNA, 20 nt, synthetic construct
  source 1..20: mol_type = other RNA
ttgattgtcaggaagcattc

SEQ ID NO: 6420 - RNA, 20 nt, synthetic construct
  source 1..20: mol_type = other RNA
ttgcaacaacctgcccctga

SEQ ID NO: 6421 - RNA, 20 nt, synthetic construct
  source 1..20: mol_type = other RNA
ttgcaagattgaccccggaa

SEQ ID NO: 6422 - RNA, 20 nt, synthetic construct
  source 1..20: mol_type = other RNA
ttgcactggaaatacacatg

SEQ ID NO: 6423 - RNA, 20 nt, synthetic construct
  source 1..20: mol_type = other RNA
ttgcataataagctaaagag

SEQ ID NO: 6424 - RNA, 20 nt, synthetic construct
  source 1..20: mol_type = other RNA
ttgcatttggtcaagatttt

SEQ ID NO: 6425 - RNA, 20 nt, synthetic construct
  source 1..20: mol_type = other RNA
ttgcctgaaataaatccaaa

SEQ ID NO: 6426 - RNA, 20 nt, synthetic construct
  source 1..20: mol_type = other RNA
ttgctacctcaagggggact

SEQ ID NO: 6427 - RNA, 20 nt, synthetic construct
  source 1..20: mol_type = other RNA
ttgcttatctgttagtttca

SEQ ID NO: 6428 - RNA, 20 nt, synthetic construct
  source 1..20: mol_type = other RNA
ttggaatatacaaagtacag

SEQ ID NO: 6429 - RNA, 20 nt, synthetic construct
  source 1..20: mol_type = other RNA
ttggacttgcctgaaataaa

SEQ ID NO: 6430 - RNA, 20 nt, synthetic construct
  source 1..20: mol_type = other RNA
ttggatttatttcaggcaag

SEQ ID NO: 6431 - RNA, 20 nt, synthetic construct
  source 1..20: mol_type = other RNA
ttggcctctttcagcctctt

SEQ ID NO: 6432 - RNA, 20 nt, synthetic construct
  source 1..20: mol_type = other RNA
ttgggattctttccattatg

SEQ ID NO: 6433 - RNA, 20 nt, synthetic construct
  source 1..20: mol_type = other RNA
ttggggactcatttcattcc

SEQ ID NO: 6434 - RNA, 20 nt, synthetic construct
  source 1..20: mol_type = other RNA
ttggtcaagattttgaatgc

SEQ ID NO: 6435 - RNA, 20 nt, synthetic construct
  source 1..20: mol_type = other RNA
ttggttcatgtcttcttact

SEQ ID NO: 6436 - RNA, 20 nt, synthetic construct
  source 1..20: mol_type = other RNA
ttgtatattccaaagtatac

SEQ ID NO: 6437 - RNA, 20 nt, synthetic construct
  source 1..20: mol_type = other RNA
ttgtatcctaacatatactt

SEQ ID NO: 6438 - RNA, 20 nt, synthetic construct
  source 1..20: mol_type = other RNA
ttgtattcagtgagggtctt

SEQ ID NO: 6439 - RNA, 20 nt, synthetic construct
  source 1..20: mol_type = other RNA
ttgtcagctactaatgatgt

SEQ ID NO: 6440 - RNA, 20 nt, synthetic construct
  source 1..20: mol_type = other RNA
ttgtcaggaagcattcaaaa

SEQ ID NO: 6441 - RNA, 20 nt, synthetic construct
  source 1..20: mol_type = other RNA
ttgtcctgctttctggagtg

SEQ ID NO: 6442 - RNA, 20 nt, synthetic construct
  source 1..20: mol_type = other RNA
ttgtctggctcataaacatt

SEQ ID NO: 6443 - RNA, 20 nt, synthetic construct
  source 1..20: mol_type = other RNA
ttgtgaaatgaaaacatgta

SEQ ID NO: 6444 - RNA, 20 nt, synthetic construct
  source 1..20: mol_type = other RNA
ttgtgaagtacatattagga

SEQ ID NO: 6445 - RNA, 20 nt, synthetic construct
  source 1..20: mol_type = other RNA
ttgtgacctgaggatttaag

SEQ ID NO: 6446 - RNA, 20 nt, synthetic construct
  source 1..20: mol_type = other RNA
ttgtgatcaatgaaactggg

SEQ ID NO: 6447 - RNA, 20 nt, synthetic construct
  source 1..20: mol_type = other RNA
ttgtggctcaggggcaggtt

SEQ ID NO: 6448 - RNA, 20 nt, synthetic construct
  source 1..20: mol_type = other RNA
ttgttacaggcaccgagaat

SEQ ID NO: 6449 - RNA, 20 nt, synthetic construct
  source 1..20: mol_type = other RNA
ttgttgaaagctccttttgg

SEQ ID NO: 6450 - RNA, 20 nt, synthetic construct
  source 1..20: mol_type = other RNA
ttgttgcaagattgaccccg

SEQ ID NO: 6451 - RNA, 20 nt, synthetic construct
  source 1..20: mol_type = other RNA
tttaactcacctctcaaggt

SEQ ID NO: 6452 - RNA, 20 nt, synthetic construct
  source 1..20: mol_type = other RNA
tttaagcactattagagttg

SEQ ID NO: 6453 - RNA, 20 nt, synthetic construct
  source 1..20: mol_type = other RNA
tttaagggatggaaaaggaa

SEQ ID NO: 6454 - RNA, 20 nt, synthetic construct
  source 1..20: mol_type = other RNA
tttagaagtgaagatgctgc

SEQ ID NO: 6455 - RNA, 20 nt, synthetic construct
  source 1..20: mol_type = other RNA
tttagcttattatgcaagcc

SEQ ID NO: 6456 - RNA, 20 nt, synthetic construct
  source 1..20: mol_type = other RNA
tttaggcagattgaaaagga

SEQ ID NO: 6457 - RNA, 20 nt, synthetic construct
  source 1..20: mol_type = other RNA
tttagtcatacacacacaca

SEQ ID NO: 6458 - RNA, 20 nt, synthetic construct
  source 1..20: mol_type = other RNA
tttatatgtcaacgtatctg

SEQ ID NO: 6459 - RNA, 20 nt, synthetic construct
  source 1..20: mol_type = other RNA
tttatgagccagacaaatgg

SEQ ID NO: 6460 - RNA, 20 nt, synthetic construct
  source 1..20: mol_type = other RNA
tttatgtagatgtgcatttt

SEQ ID NO: 6461 - RNA, 20 nt, synthetic construct
  source 1..20: mol_type = other RNA
tttatttcaggcaagtccaa

SEQ ID NO: 6462 - RNA, 20 nt, synthetic construct
  source 1..20: mol_type = other RNA
tttcaatctgcctaaatact

SEQ ID NO: 6463 - RNA, 20 nt, synthetic construct
  source 1..20: mol_type = other RNA
tttcacaaaaatgcacatct

SEQ ID NO: 6464 - RNA, 20 nt, synthetic construct
  source 1..20: mol_type = other RNA
tttcaccgatggctcaggat

SEQ ID NO: 6465 - RNA, 20 nt, synthetic construct
  source 1..20: mol_type = other RNA
tttcagatacatggttgtga

SEQ ID NO: 6466 - RNA, 20 nt, synthetic construct
  source 1..20: mol_type = other RNA
tttcagcctctttagcttat

SEQ ID NO: 6467 - RNA, 20 nt, synthetic construct
  source 1..20: mol_type = other RNA
tttcaggcaagtccaactca

SEQ ID NO: 6468 - RNA, 20 nt, synthetic construct
  source 1..20: mol_type = other RNA
tttcatgcttctccctcttc

SEQ ID NO: 6469 - RNA, 20 nt, synthetic construct
  source 1..20: mol_type = other RNA
tttcattcctaacacagcat

SEQ ID NO: 6470 - RNA, 20 nt, synthetic construct
  source 1..20: mol_type = other RNA
tttcattgatcacaaggcca

SEQ ID NO: 6471 - RNA, 20 nt, synthetic construct
  source 1..20: mol_type = other RNA
tttcatttcacaaaaatgca

SEQ ID NO: 6472 - RNA, 20 nt, synthetic construct
  source 1..20: mol_type = other RNA
tttccagtgcaattgtaggg

SEQ ID NO: 6473 - RNA, 20 nt, synthetic construct
  source 1..20: mol_type = other RNA
tttccatcccttaaatcctc

SEQ ID NO: 6474 - RNA, 20 nt, synthetic construct
  source 1..20: mol_type = other RNA
tttccattatgattctttgt

SEQ ID NO: 6475 - RNA, 20 nt, synthetic construct
  source 1..20: mol_type = other RNA
tttcctaatatgtacttcac

SEQ ID NO: 6476 - RNA, 20 nt, synthetic construct
  source 1..20: mol_type = other RNA
tttcggcttatataagctct

SEQ ID NO: 6477 - RNA, 20 nt, synthetic construct
  source 1..20: mol_type = other RNA
tttctggagtgaagtataag

SEQ ID NO: 6478 - RNA, 20 nt, synthetic construct
  source 1..20: mol_type = other RNA
tttgaaccctgtggtctcaa

SEQ ID NO: 6479 - RNA, 20 nt, synthetic construct
  source 1..20: mol_type = other RNA
tttgaatgcttcctgacaat

SEQ ID NO: 6480 - RNA, 20 nt, synthetic construct
  source 1..20: mol_type = other RNA
tttgaggaatctcagacgtt

SEQ ID NO: 6481 - RNA, 20 nt, synthetic construct
  source 1..20: mol_type = other RNA
tttgaggtcaagtaagaaga

SEQ ID NO: 6482 - RNA, 20 nt, synthetic construct
  source 1..20: mol_type = other RNA
tttggaatatacaaagtaca

SEQ ID NO: 6483 - RNA, 20 nt, synthetic construct
  source 1..20: mol_type = other RNA
tttggatttatttcaggcaa

SEQ ID NO: 6484 - RNA, 20 nt, synthetic construct
  source 1..20: mol_type = other RNA
tttgggattctttccattat

SEQ ID NO: 6485 - RNA, 20 nt, synthetic construct
  source 1..20: mol_type = other RNA
tttggggactcatttcattc

SEQ ID NO: 6486 - RNA, 20 nt, synthetic construct
  source 1..20: mol_type = other RNA
tttggtcaagattttgaatg

SEQ ID NO: 6487 - RNA, 20 nt, synthetic construct
  source 1..20: mol_type = other RNA
tttgtatcctaacatatact

SEQ ID NO: 6488 - RNA, 20 nt, synthetic construct
  source 1..20: mol_type = other RNA
tttgtctggctcataaacat

SEQ ID NO: 6489 - RNA, 20 nt, synthetic construct
  source 1..20: mol_type = other RNA
tttgtgaaatgaaaacatgt

SEQ ID NO: 6490 - RNA, 20 nt, synthetic construct
  source 1..20: mol_type = other RNA
tttgttacaggcaccgagaa

SEQ ID NO: 6491 - RNA, 20 nt, synthetic construct
  source 1..20: mol_type = other RNA
ttttaactcacctctcaagg

SEQ ID NO: 6492 - RNA, 20 nt, synthetic construct
  source 1..20: mol_type = other RNA
ttttaagcactattagagtt

SEQ ID NO: 6493 - RNA, 20 nt, synthetic construct
  source 1..20: mol_type = other RNA
ttttcaatctgcctaaatac

SEQ ID NO: 6494 - RNA, 20 nt, synthetic construct
  source 1..20: mol_type = other RNA
ttttcatgcttctccctctt

SEQ ID NO: 6495 - RNA, 20 nt, synthetic construct
  source 1..20: mol_type = other RNA
ttttcatttcacaaaaatgc

SEQ ID NO: 6496 - RNA, 20 nt, synthetic construct
  source 1..20: mol_type = other RNA
ttttccatcccttaaatcct

SEQ ID NO: 6497 - RNA, 20 nt, synthetic construct
  source 1..20: mol_type = other RNA
ttttcctaatatgtacttca

SEQ ID NO: 6498 - RNA, 20 nt, synthetic construct
  source 1..20: mol_type = other RNA
ttttcggcttatataagctc

SEQ ID NO: 6499 - RNA, 20 nt, synthetic construct
  source 1..20: mol_type = other RNA
ttttgaaccctgtggtctca

SEQ ID NO: 6500 - RNA, 20 nt, synthetic construct
  source 1..20: mol_type = other RNA
ttttgaatgcttcctgacaa

SEQ ID NO: 6501 - RNA, 20 nt, synthetic construct
  source 1..20: mol_type = other RNA
ttttgaggaatctcagacgt

SEQ ID NO: 6502 - RNA, 20 nt, synthetic construct
  source 1..20: mol_type = other RNA
ttttggatttatttcaggca

SEQ ID NO: 6503 - RNA, 20 nt, synthetic construct
  source 1..20: mol_type = other RNA
ttttggggactcatttcatt

SEQ ID NO: 6504 - RNA, 20 nt, synthetic construct
  source 1..20: mol_type = other RNA
ttttgtgaaatgaaaacatg

SEQ ID NO: 6505 - RNA, 20 nt, synthetic construct
  source 1..20: mol_type = other RNA
tttttaagcactattagagt

SEQ ID NO: 6506 - RNA, 20 nt, synthetic construct
  source 1..20: mol_type = other RNA
tttttcatgcttctccctct

SEQ ID NO: 6507 - RNA, 20 nt, synthetic construct
  source 1..20: mol_type = other RNA
tttttcggcttatataagct

SEQ ID NO: 6508 - RNA, 21 nt, synthetic construct
  source 1..21: mol_type = other RNA
aaaaacgtctgagattcctca

SEQ ID NO: 6509 - RNA, 21 nt, synthetic construct
  source 1..21: mol_type = other RNA
aaaaagcagctaccaggtgtt

SEQ ID NO: 6510 - RNA, 21 nt, synthetic construct
  source 1..21: mol_type = other RNA
aaaaatcattgattgtcagct

SEQ ID NO: 6511 - RNA, 21 nt, synthetic construct
  source 1..21: mol_type = other RNA
aaaacatcattagtagctgac

SEQ ID NO: 6512 - RNA, 21 nt, synthetic construct
  source 1..21: mol_type = other RNA
aaaacatctctcttgcttatc

SEQ ID NO: 6513 - RNA, 21 nt, synthetic construct
  source 1..21: mol_type = other RNA
aaaacgtctgagattcctcaa

SEQ ID NO: 6514 - RNA, 21 nt, synthetic construct
  source 1..21: mol_type = other RNA
aaaagcagctaccaggtgttc

SEQ ID NO: 6515 - RNA, 21 nt, synthetic construct
  source 1..21: mol_type = other RNA
aaaaggaagactagaggcttg

SEQ ID NO: 6516 - RNA, 21 nt, synthetic construct
  source 1..21: mol_type = other RNA
aaaaggacaccttttaactca

SEQ ID NO: 6517 - RNA, 21 nt, synthetic construct
  source 1..21: mol_type = other RNA
aaaaggagctttcaacaagga

SEQ ID NO: 6518 - RNA, 21 nt, synthetic construct
  source 1..21: mol_type = other RNA
aaaaggtgtccttttcaatct

SEQ ID NO: 6519 - RNA, 21 nt, synthetic construct
  source 1..21: mol_type = other RNA
aaaatatgggttgcatttggt

SEQ ID NO: 6520 - RNA, 21 nt, synthetic construct
  source 1..21: mol_type = other RNA
aaaatcattgattgtcagcta

SEQ ID NO: 6521 - RNA, 21 nt, synthetic construct
  source 1..21: mol_type = other RNA
aaaatcttgaccaaatgcaac

SEQ ID NO: 6522 - RNA, 21 nt, synthetic construct
  source 1..21: mol_type = other RNA
aaaatgtctgtagctcctcaa

SEQ ID NO: 6523 - RNA, 21 nt, synthetic construct
  source 1..21: mol_type = other RNA
aaaattgaccagagagagctc

SEQ ID NO: 6524 - RNA, 21 nt, synthetic construct
  source 1..21: mol_type = other RNA
aaacatcattagtagctgaca

SEQ ID NO: 6525 - RNA, 21 nt, synthetic construct
  source 1..21: mol_type = other RNA
aaacatctctcttgcttatct

SEQ ID NO: 6526 - RNA, 21 nt, synthetic construct
  source 1..21: mol_type = other RNA
aaacattaggtgagttgagga

SEQ ID NO: 6527 - RNA, 21 nt, synthetic construct
  source 1..21: mol_type = other RNA
aaacgtctgagattcctcaaa

SEQ ID NO: 6528 - RNA, 21 nt, synthetic construct
  source 1..21: mol_type = other RNA
aaactaacagataagcaagag

SEQ ID NO: 6529 - RNA, 21 nt, synthetic construct
  source 1..21: mol_type = other RNA
aaactgggctgtactttgtat

SEQ ID NO: 6530 - RNA, 21 nt, synthetic construct
  source 1..21: mol_type = other RNA
aaagaatcccaaagtgcttct

SEQ ID NO: 6531 - RNA, 21 nt, synthetic construct
  source 1..21: mol_type = other RNA
aaagacagtcccccttgaggt

SEQ ID NO: 6532 - RNA, 21 nt, synthetic construct
  source 1..21: mol_type = other RNA
aaagagagaatgtagatattg

SEQ ID NO: 6533 - RNA, 21 nt, synthetic construct
  source 1..21: mol_type = other RNA
aaagaggccaatgccccactg

SEQ ID NO: 6534 - RNA, 21 nt, synthetic construct
  source 1..21: mol_type = other RNA
aaagaggctgaaagaggccaa

SEQ ID NO: 6535 - RNA, 21 nt, synthetic construct
  source 1..21: mol_type = other RNA
aaagcagctaccaggtgttct

SEQ ID NO: 6536 - RNA, 21 nt, synthetic construct
  source 1..21: mol_type = other RNA
aaagcaggacaattccatagg

SEQ ID NO: 6537 - RNA, 21 nt, synthetic construct
  source 1..21: mol_type = other RNA
aaagctccttttggatttatt

SEQ ID NO: 6538 - RNA, 21 nt, synthetic construct
  source 1..21: mol_type = other RNA
aaaggaagactagaggcttgc

SEQ ID NO: 6539 - RNA, 21 nt, synthetic construct
  source 1..21: mol_type = other RNA
aaaggacaccttttaactcac

SEQ ID NO: 6540 - RNA, 21 nt, synthetic construct
  source 1..21: mol_type = other RNA
aaaggagctttcaacaaggaa

SEQ ID NO: 6541 - RNA, 21 nt, synthetic construct
  source 1..21: mol_type = other RNA
aaaggtgtccttttcaatctg

SEQ ID NO: 6542 - RNA, 21 nt, synthetic construct
  source 1..21: mol_type = other RNA
aaagtacagcccagtttcatt

SEQ ID NO: 6543 - RNA, 21 nt, synthetic construct
  source 1..21: mol_type = other RNA
aaagtatacttccggggtcaa

SEQ ID NO: 6544 - RNA, 21 nt, synthetic construct
  source 1..21: mol_type = other RNA
aaagtgcttctcttagagctt

SEQ ID NO: 6545 - RNA, 21 nt, synthetic construct
  source 1..21: mol_type = other RNA
aaataaatccaaaaggagctt

SEQ ID NO: 6546 - RNA, 21 nt, synthetic construct
  source 1..21: mol_type = other RNA
aaatacacatgctgtgttagg

SEQ ID NO: 6547 - RNA, 21 nt, synthetic construct
  source 1..21: mol_type = other RNA
aaatactctcaggcactaaga

SEQ ID NO: 6548 - RNA, 21 nt, synthetic construct
  source 1..21: mol_type = other RNA
aaatatgggttgcatttggtc

SEQ ID NO: 6549 - RNA, 21 nt, synthetic construct
  source 1..21: mol_type = other RNA
aaatcattgattgtcagctac

SEQ ID NO: 6550 - RNA, 21 nt, synthetic construct
  source 1..21: mol_type = other RNA
aaatccaaaaggagctttcaa

SEQ ID NO: 6551 - RNA, 21 nt, synthetic construct
  source 1..21: mol_type = other RNA
aaatcctcaggtcacaaccat

SEQ ID NO: 6552 - RNA, 21 nt, synthetic construct
  source 1..21: mol_type = other RNA
aaatcttgaccaaatgcaacc

SEQ ID NO: 6553 - RNA, 21 nt, synthetic construct
  source 1..21: mol_type = other RNA
aaatgagtccccaaaacatct

SEQ ID NO: 6554 - RNA, 21 nt, synthetic construct
  source 1..21: mol_type = other RNA
aaatgatcagcactggtaaga

SEQ ID NO: 6555 - RNA, 21 nt, synthetic construct
  source 1..21: mol_type = other RNA
aaatgcaacccatattttcct

SEQ ID NO: 6556 - RNA, 21 nt, synthetic construct
  source 1..21: mol_type = other RNA
aaatgcatatcctgagccatc

SEQ ID NO: 6557 - RNA, 21 nt, synthetic construct
  source 1..21: mol_type = other RNA
aaatgcatgtaagaagaccct

SEQ ID NO: 6558 - RNA, 21 nt, synthetic construct
  source 1..21: mol_type = other RNA
aaatggaggaatatgacggaa

SEQ ID NO: 6559 - RNA, 21 nt, synthetic construct
  source 1..21: mol_type = other RNA
aaatgtctgtagctcctcaac

SEQ ID NO: 6560 - RNA, 21 nt, synthetic construct
  source 1..21: mol_type = other RNA
aaattgaccagagagagctca

SEQ ID NO: 6561 - RNA, 21 nt, synthetic construct
  source 1..21: mol_type = other RNA
aacaacctgcccctgagccac

SEQ ID NO: 6562 - RNA, 21 nt, synthetic construct
  source 1..21: mol_type = other RNA
aacacagcatgtgtatttcca

SEQ ID NO: 6563 - RNA, 21 nt, synthetic construct
  source 1..21: mol_type = other RNA
aacacctggtagctgcttttt

SEQ ID NO: 6564 - RNA, 21 nt, synthetic construct
  source 1..21: mol_type = other RNA
aacactgcccccaggtagctg

SEQ ID NO: 6565 - RNA, 21 nt, synthetic construct
  source 1..21: mol_type = other RNA
aacagataagcaagagagatg

SEQ ID NO: 6566 - RNA, 21 nt, synthetic construct
  source 1..21: mol_type = other RNA
aacatagaactctgggctgcc

SEQ ID NO: 6567 - RNA, 21 nt, synthetic construct
  source 1..21: mol_type = other RNA
aacatcattagtagctgacaa

SEQ ID NO: 6568 - RNA, 21 nt, synthetic construct
  source 1..21: mol_type = other RNA
aacatctctcttgcttatctg

SEQ ID NO: 6569 - RNA, 21 nt, synthetic construct
  source 1..21: mol_type = other RNA
aacattaggtgagttgaggag

SEQ ID NO: 6570 - RNA, 21 nt, synthetic construct
  source 1..21: mol_type = other RNA
aacattctcggtgcctgtaac

SEQ ID NO: 6571 - RNA, 21 nt, synthetic construct
  source 1..21: mol_type = other RNA
aaccaagtggaccttgagacc

SEQ ID NO: 6572 - RNA, 21 nt, synthetic construct
  source 1..21: mol_type = other RNA
aaccatgtatctgaaagacag

SEQ ID NO: 6573 - RNA, 21 nt, synthetic construct
  source 1..21: mol_type = other RNA
aacccatattttcctaatatg

SEQ ID NO: 6574 - RNA, 21 nt, synthetic construct
  source 1..21: mol_type = other RNA
aaccctgtggtctcaaggtcc

SEQ ID NO: 6575 - RNA, 21 nt, synthetic construct
  source 1..21: mol_type = other RNA
aacctgcccctgagccacaag

SEQ ID NO: 6576 - RNA, 21 nt, synthetic construct
  source 1..21: mol_type = other RNA
aacgtatctgagctctctctg

SEQ ID NO: 6577 - RNA, 21 nt, synthetic construct
  source 1..21: mol_type = other RNA
aacgtctgagattcctcaaaa

SEQ ID NO: 6578 - RNA, 21 nt, synthetic construct
  source 1..21: mol_type = other RNA
aactaacagataagcaagaga

SEQ ID NO: 6579 - RNA, 21 nt, synthetic construct
  source 1..21: mol_type = other RNA
aactcaaggtccatgcctctg

SEQ ID NO: 6580 - RNA, 21 nt, synthetic construct
  source 1..21: mol_type = other RNA
aactcacctaatgtttatgag

SEQ ID NO: 6581 - RNA, 21 nt, synthetic construct
  source 1..21: mol_type = other RNA
aactcacctctcaaggtgggc

SEQ ID NO: 6582 - RNA, 21 nt, synthetic construct
  source 1..21: mol_type = other RNA
aactctaagtatccccaggat

SEQ ID NO: 6583 - RNA, 21 nt, synthetic construct
  source 1..21: mol_type = other RNA
aactctgggctgccatgtgaa

SEQ ID NO: 6584 - RNA, 21 nt, synthetic construct
  source 1..21: mol_type = other RNA
aactgggctgtactttgtata

SEQ ID NO: 6585 - RNA, 21 nt, synthetic construct
  source 1..21: mol_type = other RNA
aagaacatagaactctgggct

SEQ ID NO: 6586 - RNA, 21 nt, synthetic construct
  source 1..21: mol_type = other RNA
aagaagacatgaaccaagtgg

SEQ ID NO: 6587 - RNA, 21 nt, synthetic construct
  source 1..21: mol_type = other RNA
aagaagaccctcactgaatac

SEQ ID NO: 6588 - RNA, 21 nt, synthetic construct
  source 1..21: mol_type = other RNA
aagaagggtggccttgtgatc

SEQ ID NO: 6589 - RNA, 21 nt, synthetic construct
  source 1..21: mol_type = other RNA
aagaatcccaaagtgcttctc

SEQ ID NO: 6590 - RNA, 21 nt, synthetic construct
  source 1..21: mol_type = other RNA
aagacacctatggaattgtcc

SEQ ID NO: 6591 - RNA, 21 nt, synthetic construct
  source 1..21: mol_type = other RNA
aagacagtcccccttgaggta

SEQ ID NO: 6592 - RNA, 21 nt, synthetic construct
  source 1..21: mol_type = other RNA
aagacatgaaccaagtggacc

SEQ ID NO: 6593 - RNA, 21 nt, synthetic construct
  source 1..21: mol_type = other RNA
aagaccctcactgaatacaac

SEQ ID NO: 6594 - RNA, 21 nt, synthetic construct
  source 1..21: mol_type = other RNA
aagactagaggcttgcataat

SEQ ID NO: 6595 - RNA, 21 nt, synthetic construct
  source 1..21: mol_type = other RNA
aagagaagcactttgggattc

SEQ ID NO: 6596 - RNA, 21 nt, synthetic construct
  source 1..21: mol_type = other RNA
aagagagaatgtagatattgt

SEQ ID NO: 6597 - RNA, 21 nt, synthetic construct
  source 1..21: mol_type = other RNA
aagagagatgttttggggact

SEQ ID NO: 6598 - RNA, 21 nt, synthetic construct
  source 1..21: mol_type = other RNA
aagaggccaatgccccactgg

SEQ ID NO: 6599 - RNA, 21 nt, synthetic construct
  source 1..21: mol_type = other RNA
aagaggctgaaagaggccaat

SEQ ID NO: 6600 - RNA, 21 nt, synthetic construct
  source 1..21: mol_type = other RNA
aagagggagaagcatgaaaaa

SEQ ID NO: 6601 - RNA, 21 nt, synthetic construct
  source 1..21: mol_type = other RNA
aagatgagtgtagaacacctg

SEQ ID NO: 6602 - RNA, 21 nt, synthetic construct
  source 1..21: mol_type = other RNA
aagatgatgagctactgcact

SEQ ID NO: 6603 - RNA, 21 nt, synthetic construct
  source 1..21: mol_type = other RNA
aagatgctgccagtggggcat

SEQ ID NO: 6604 - RNA, 21 nt, synthetic construct
  source 1..21: mol_type = other RNA
aagattgaacactgcccccag

SEQ ID NO: 6605 - RNA, 21 nt, synthetic construct
  source 1..21: mol_type = other RNA
aagattgaccccggaagtata

SEQ ID NO: 6606 - RNA, 21 nt, synthetic construct
  source 1..21: mol_type = other RNA
aagattttgaatgcttcctga

SEQ ID NO: 6607 - RNA, 21 nt, synthetic construct
  source 1..21: mol_type = other RNA
aagcaagagagatgttttggg

SEQ ID NO: 6608 - RNA, 21 nt, synthetic construct
  source 1..21: mol_type = other RNA
aagcactattagagttgattg

SEQ ID NO: 6609 - RNA, 21 nt, synthetic construct
  source 1..21: mol_type = other RNA
aagcactttgggattctttcc

SEQ ID NO: 6610 - RNA, 21 nt, synthetic construct
  source 1..21: mol_type = other RNA
aagcagctaccaggtgttcta

SEQ ID NO: 6611 - RNA, 21 nt, synthetic construct
  source 1..21: mol_type = other RNA
aagcaggacaattccataggt

SEQ ID NO: 6612 - RNA, 21 nt, synthetic construct
  source 1..21: mol_type = other RNA
aagcatgaaaaagcagctacc

SEQ ID NO: 6613 - RNA, 21 nt, synthetic construct
  source 1..21: mol_type = other RNA
aagcattcaaaatcttgacca

SEQ ID NO: 6614 - RNA, 21 nt, synthetic construct
  source 1..21: mol_type = other RNA
aagccgaaaaacgtctgagat

SEQ ID NO: 6615 - RNA, 21 nt, synthetic construct
  source 1..21: mol_type = other RNA
aagcctctagtcttccttttc

SEQ ID NO: 6616 - RNA, 21 nt, synthetic construct
  source 1..21: mol_type = other RNA
aagctaaagaggctgaaagag

SEQ ID NO: 6617 - RNA, 21 nt, synthetic construct
  source 1..21: mol_type = other RNA
aagctccttttggatttattt

SEQ ID NO: 6618 - RNA, 21 nt, synthetic construct
  source 1..21: mol_type = other RNA
aagctctaagagaagcacttt

SEQ ID NO: 6619 - RNA, 21 nt, synthetic construct
  source 1..21: mol_type = other RNA
aaggaagactagaggcttgca

SEQ ID NO: 6620 - RNA, 21 nt, synthetic construct
  source 1..21: mol_type = other RNA
aaggacaccttttaactcacc

SEQ ID NO: 6621 - RNA, 21 nt, synthetic construct
  source 1..21: mol_type = other RNA
aaggagctttcaacaaggaat

SEQ ID NO: 6622 - RNA, 21 nt, synthetic construct
  source 1..21: mol_type = other RNA
aaggccacccttcttatactt

SEQ ID NO: 6623 - RNA, 21 nt, synthetic construct
  source 1..21: mol_type = other RNA
aaggcccaccttgagaggtga

SEQ ID NO: 6624 - RNA, 21 nt, synthetic construct
  source 1..21: mol_type = other RNA
aagggatggaaaaggaagact

SEQ ID NO: 6625 - RNA, 21 nt, synthetic construct
  source 1..21: mol_type = other RNA
aagggggactgtctttcagat

SEQ ID NO: 6626 - RNA, 21 nt, synthetic construct
  source 1..21: mol_type = other RNA
aagggtggccttgtgatcaat

SEQ ID NO: 6627 - RNA, 21 nt, synthetic construct
  source 1..21: mol_type = other RNA
aaggtccacttggttcatgtc

SEQ ID NO: 6628 - RNA, 21 nt, synthetic construct
  source 1..21: mol_type = other RNA
aaggtccatgcctctggaatg

SEQ ID NO: 6629 - RNA, 21 nt, synthetic construct
  source 1..21: mol_type = other RNA
aaggtctacatgaggaactct

SEQ ID NO: 6630 - RNA, 21 nt, synthetic construct
  source 1..21: mol_type = other RNA
aaggtgggccttgctacctca

SEQ ID NO: 6631 - RNA, 21 nt, synthetic construct
  source 1..21: mol_type = other RNA
aaggtgtccttttcaatctgc

SEQ ID NO: 6632 - RNA, 21 nt, synthetic construct
  source 1..21: mol_type = other RNA
aagtaagaagacatgaaccaa

SEQ ID NO: 6633 - RNA, 21 nt, synthetic construct
  source 1..21: mol_type = other RNA
aagtacagcccagtttcattg

SEQ ID NO: 6634 - RNA, 21 nt, synthetic construct
  source 1..21: mol_type = other RNA
aagtataagaagggtggcctt

SEQ ID NO: 6635 - RNA, 21 nt, synthetic construct
  source 1..21: mol_type = other RNA
aagtatacttccggggtcaat

SEQ ID NO: 6636 - RNA, 21 nt, synthetic construct
  source 1..21: mol_type = other RNA
aagtatccccaggatctggtg

SEQ ID NO: 6637 - RNA, 21 nt, synthetic construct
  source 1..21: mol_type = other RNA
aagtccaactcaaggtccatg

SEQ ID NO: 6638 - RNA, 21 nt, synthetic construct
  source 1..21: mol_type = other RNA
aagtgaagatgctgccagtgg

SEQ ID NO: 6639 - RNA, 21 nt, synthetic construct
  source 1..21: mol_type = other RNA
aagtgcttctcttagagctta

SEQ ID NO: 6640 - RNA, 21 nt, synthetic construct
  source 1..21: mol_type = other RNA
aagtggaccttgagaccacag

SEQ ID NO: 6641 - RNA, 21 nt, synthetic construct
  source 1..21: mol_type = other RNA
aataaatccaaaaggagcttt

SEQ ID NO: 6642 - RNA, 21 nt, synthetic construct
  source 1..21: mol_type = other RNA
aataagctaaagaggctgaaa

SEQ ID NO: 6643 - RNA, 21 nt, synthetic construct
  source 1..21: mol_type = other RNA
aatacaacattctcggtgcct

SEQ ID NO: 6644 - RNA, 21 nt, synthetic construct
  source 1..21: mol_type = other RNA
aatacacatgctgtgttagga

SEQ ID NO: 6645 - RNA, 21 nt, synthetic construct
  source 1..21: mol_type = other RNA
aatactctcaggcactaagat

SEQ ID NO: 6646 - RNA, 21 nt, synthetic construct
  source 1..21: mol_type = other RNA
aatatacaaagtacagcccag

SEQ ID NO: 6647 - RNA, 21 nt, synthetic construct
  source 1..21: mol_type = other RNA
aatatgacggaagaacataga

SEQ ID NO: 6648 - RNA, 21 nt, synthetic construct
  source 1..21: mol_type = other RNA
aatatgggttgcatttggtca

SEQ ID NO: 6649 - RNA, 21 nt, synthetic construct
  source 1..21: mol_type = other RNA
aatcaactctaatagtgctta

SEQ ID NO: 6650 - RNA, 21 nt, synthetic construct
  source 1..21: mol_type = other RNA
aatcataatggaaagaatccc

SEQ ID NO: 6651 - RNA, 21 nt, synthetic construct
  source 1..21: mol_type = other RNA
aatcattgattgtcagctact

SEQ ID NO: 6652 - RNA, 21 nt, synthetic construct
  source 1..21: mol_type = other RNA
aatccaaaaggagctttcaac

SEQ ID NO: 6653 - RNA, 21 nt, synthetic construct
  source 1..21: mol_type = other RNA
aatcccaaagtgcttctctta

SEQ ID NO: 6654 - RNA, 21 nt, synthetic construct
  source 1..21: mol_type = other RNA
aatcctcaggtcacaaccatg

SEQ ID NO: 6655 - RNA, 21 nt, synthetic construct
  source 1..21: mol_type = other RNA
aatctcagacgtttttcggct

SEQ ID NO: 6656 - RNA, 21 nt, synthetic construct
  source 1..21: mol_type = other RNA
aatctgcctaaatactctcag

SEQ ID NO: 6657 - RNA, 21 nt, synthetic construct
  source 1..21: mol_type = other RNA
aatcttaccagtgctgatcat

SEQ ID NO: 6658 - RNA, 21 nt, synthetic construct
  source 1..21: mol_type = other RNA
aatcttgaccaaatgcaaccc

SEQ ID NO: 6659 - RNA, 21 nt, synthetic construct
  source 1..21: mol_type = other RNA
aatcttgcaacaacctgcccc

SEQ ID NO: 6660 - RNA, 21 nt, synthetic construct
  source 1..21: mol_type = other RNA
aatgaaactgggctgtacttt

SEQ ID NO: 6661 - RNA, 21 nt, synthetic construct
  source 1..21: mol_type = other RNA
aatgaaatgagtccccaaaac

SEQ ID NO: 6662 - RNA, 21 nt, synthetic construct
  source 1..21: mol_type = other RNA
aatgagtccccaaaacatctc

SEQ ID NO: 6663 - RNA, 21 nt, synthetic construct
  source 1..21: mol_type = other RNA
aatgatcagcactggtaagat

SEQ ID NO: 6664 - RNA, 21 nt, synthetic construct
  source 1..21: mol_type = other RNA
aatgcaacccatattttccta

SEQ ID NO: 6665 - RNA, 21 nt, synthetic construct
  source 1..21: mol_type = other RNA
aatgcatatcctgagccatcg

SEQ ID NO: 6666 - RNA, 21 nt, synthetic construct
  source 1..21: mol_type = other RNA
aatgcatgtaagaagaccctc

SEQ ID NO: 6667 - RNA, 21 nt, synthetic construct
  source 1..21: mol_type = other RNA
aatgccccactggcagcatct

SEQ ID NO: 6668 - RNA, 21 nt, synthetic construct
  source 1..21: mol_type = other RNA
aatgcttcctgacaatcaact

SEQ ID NO: 6669 - RNA, 21 nt, synthetic construct
  source 1..21: mol_type = other RNA
aatggaaagaatcccaaagtg

SEQ ID NO: 6670 - RNA, 21 nt, synthetic construct
  source 1..21: mol_type = other RNA
aatggaggaatatgacggaag

SEQ ID NO: 6671 - RNA, 21 nt, synthetic construct
  source 1..21: mol_type = other RNA
aatgggaagacacctatggaa

SEQ ID NO: 6672 - RNA, 21 nt, synthetic construct
  source 1..21: mol_type = other RNA
aatgtagatattgtgaagtac

SEQ ID NO: 6673 - RNA, 21 nt, synthetic construct
  source 1..21: mol_type = other RNA
aatgtctgtagctcctcaact

SEQ ID NO: 6674 - RNA, 21 nt, synthetic construct
  source 1..21: mol_type = other RNA
aatgttgtattcagtgagggt

SEQ ID NO: 6675 - RNA, 21 nt, synthetic construct
  source 1..21: mol_type = other RNA
aatgtttatgagccagacaaa

SEQ ID NO: 6676 - RNA, 21 nt, synthetic construct
  source 1..21: mol_type = other RNA
aattccataggtgtcttccca

SEQ ID NO: 6677 - RNA, 21 nt, synthetic construct
  source 1..21: mol_type = other RNA
aattgaccagagagagctcag

SEQ ID NO: 6678 - RNA, 21 nt, synthetic construct
  source 1..21: mol_type = other RNA
aattgcactggaaatacacat

SEQ ID NO: 6679 - RNA, 21 nt, synthetic construct
  source 1..21: mol_type = other RNA
aattgtaggggtgtgtgtgtg

SEQ ID NO: 6680 - RNA, 21 nt, synthetic construct
  source 1..21: mol_type = other RNA
aattgtcctgctttctggagt

SEQ ID NO: 6681 - RNA, 21 nt, synthetic construct
  source 1..21: mol_type = other RNA
aattttgaggaatctcagacg

SEQ ID NO: 6682 - RNA, 21 nt, synthetic construct
  source 1..21: mol_type = other RNA
acaaaaatgcacatctacata

SEQ ID NO: 6683 - RNA, 21 nt, synthetic construct
  source 1..21: mol_type = other RNA
acaaagaatcataatggaaag

SEQ ID NO: 6684 - RNA, 21 nt, synthetic construct
  source 1..21: mol_type = other RNA
acaaagtacagcccagtttca

SEQ ID NO: 6685 - RNA, 21 nt, synthetic construct
  source 1..21: mol_type = other RNA
acaaatggaggaatatgacgg

SEQ ID NO: 6686 - RNA, 21 nt, synthetic construct
  source 1..21: mol_type = other RNA
acaacattctcggtgcctgta

SEQ ID NO: 6687 - RNA, 21 nt, synthetic construct
  source 1..21: mol_type = other RNA
acaaccatgtatctgaaagac

SEQ ID NO: 6688 - RNA, 21 nt, synthetic construct
  source 1..21: mol_type = other RNA
acaacctgcccctgagccaca

SEQ ID NO: 6689 - RNA, 21 nt, synthetic construct
  source 1..21: mol_type = other RNA
acaaggccacccttcttatac

SEQ ID NO: 6690 - RNA, 21 nt, synthetic construct
  source 1..21: mol_type = other RNA
acaaggtctacatgaggaact

SEQ ID NO: 6691 - RNA, 21 nt, synthetic construct
  source 1..21: mol_type = other RNA
acaatatctacattctctctt

SEQ ID NO: 6692 - RNA, 21 nt, synthetic construct
  source 1..21: mol_type = other RNA
acaatcaactctaatagtgct

SEQ ID NO: 6693 - RNA, 21 nt, synthetic construct
  source 1..21: mol_type = other RNA
acaattccataggtgtcttcc

SEQ ID NO: 6694 - RNA, 21 nt, synthetic construct
  source 1..21: mol_type = other RNA
acaattgcactggaaatacac

SEQ ID NO: 6695 - RNA, 21 nt, synthetic construct
  source 1..21: mol_type = other RNA
acacacacacccctacaattg

SEQ ID NO: 6696 - RNA, 21 nt, synthetic construct
  source 1..21: mol_type = other RNA
acacacacccctacaattgca

SEQ ID NO: 6697 - RNA, 21 nt, synthetic construct
  source 1..21: mol_type = other RNA
acacacccctacaattgcact

SEQ ID NO: 6698 - RNA, 21 nt, synthetic construct
  source 1..21: mol_type = other RNA
acacagcatgtgtatttccag

SEQ ID NO: 6699 - RNA, 21 nt, synthetic construct
  source 1..21: mol_type = other RNA
acacatgctgtgttaggaatg

SEQ ID NO: 6700 - RNA, 21 nt, synthetic construct
  source 1..21: mol_type = other RNA
acacccctacaattgcactgg

SEQ ID NO: 6701 - RNA, 21 nt, synthetic construct
  source 1..21: mol_type = other RNA
acacctatggaattgtcctgc

SEQ ID NO: 6702 - RNA, 21 nt, synthetic construct
  source 1..21: mol_type = other RNA
acacctggtagctgctttttc

SEQ ID NO: 6703 - RNA, 21 nt, synthetic construct
  source 1..21: mol_type = other RNA
acaccttttaactcacctctc

SEQ ID NO: 6704 - RNA, 21 nt, synthetic construct
  source 1..21: mol_type = other RNA
acactcatcttagtgcctgag

SEQ ID NO: 6705 - RNA, 21 nt, synthetic construct
  source 1..21: mol_type = other RNA
acactgcccccaggtagctgc

SEQ ID NO: 6706 - RNA, 21 nt, synthetic construct
  source 1..21: mol_type = other RNA
acagacattttgaaccctgtg

SEQ ID NO: 6707 - RNA, 21 nt, synthetic construct
  source 1..21: mol_type = other RNA
acagataagcaagagagatgt

SEQ ID NO: 6708 - RNA, 21 nt, synthetic construct
  source 1..21: mol_type = other RNA
acagcatgtgtatttccagtg

SEQ ID NO: 6709 - RNA, 21 nt, synthetic construct
  source 1..21: mol_type = other RNA
acagcccagtttcattgatca

SEQ ID NO: 6710 - RNA, 21 nt, synthetic construct
  source 1..21: mol_type = other RNA
acaggcaccgagaatgttgta

SEQ ID NO: 6711 - RNA, 21 nt, synthetic construct
  source 1..21: mol_type = other RNA
acagggttcaaaatgtctgta

SEQ ID NO: 6712 - RNA, 21 nt, synthetic construct
  source 1..21: mol_type = other RNA
acagtcccccttgaggtagca

SEQ ID NO: 6713 - RNA, 21 nt, synthetic construct
  source 1..21: mol_type = other RNA
acatagaactctgggctgcca

SEQ ID NO: 6714 - RNA, 21 nt, synthetic construct
  source 1..21: mol_type = other RNA
acatataaatgatcagcactg

SEQ ID NO: 6715 - RNA, 21 nt, synthetic construct
  source 1..21: mol_type = other RNA
acatattaggaaaatatgggt

SEQ ID NO: 6716 - RNA, 21 nt, synthetic construct
  source 1..21: mol_type = other RNA
acatcattagtagctgacaat

SEQ ID NO: 6717 - RNA, 21 nt, synthetic construct
  source 1..21: mol_type = other RNA
acatctctcttgcttatctgt

SEQ ID NO: 6718 - RNA, 21 nt, synthetic construct
  source 1..21: mol_type = other RNA
acatctgcccagtagtgcagt

SEQ ID NO: 6719 - RNA, 21 nt, synthetic construct
  source 1..21: mol_type = other RNA
acatgaaccaagtggaccttg

SEQ ID NO: 6720 - RNA, 21 nt, synthetic construct
  source 1..21: mol_type = other RNA
acatgaggaactctaagtatc

SEQ ID NO: 6721 - RNA, 21 nt, synthetic construct
  source 1..21: mol_type = other RNA
acatgcatttgaggtcaagta

SEQ ID NO: 6722 - RNA, 21 nt, synthetic construct
  source 1..21: mol_type = other RNA
acatgctgtgttaggaatgaa

SEQ ID NO: 6723 - RNA, 21 nt, synthetic construct
  source 1..21: mol_type = other RNA
acatggcagcccagagttcta

SEQ ID NO: 6724 - RNA, 21 nt, synthetic construct
  source 1..21: mol_type = other RNA
acatggttgtgacctgaggat

SEQ ID NO: 6725 - RNA, 21 nt, synthetic construct
  source 1..21: mol_type = other RNA
acattaggtgagttgaggagc

SEQ ID NO: 6726 - RNA, 21 nt, synthetic construct
  source 1..21: mol_type = other RNA
acattctcggtgcctgtaaca

SEQ ID NO: 6727 - RNA, 21 nt, synthetic construct
  source 1..21: mol_type = other RNA
acattctctctttagtcatac

SEQ ID NO: 6728 - RNA, 21 nt, synthetic construct
  source 1..21: mol_type = other RNA
acattttgaaccctgtggtct

SEQ ID NO: 6729 - RNA, 21 nt, synthetic construct
  source 1..21: mol_type = other RNA
accaaatgcaacccatatttt

SEQ ID NO: 6730 - RNA, 21 nt, synthetic construct
  source 1..21: mol_type = other RNA
accaagtggaccttgagacca

SEQ ID NO: 6731 - RNA, 21 nt, synthetic construct
  source 1..21: mol_type = other RNA
accacagggttcaaaatgtct

SEQ ID NO: 6732 - RNA, 21 nt, synthetic construct
  source 1..21: mol_type = other RNA
accagagagagctcagatacg

SEQ ID NO: 6733 - RNA, 21 nt, synthetic construct
  source 1..21: mol_type = other RNA
accagatcctggggatactta

SEQ ID NO: 6734 - RNA, 21 nt, synthetic construct
  source 1..21: mol_type = other RNA
accaggtgttctacactcatc

SEQ ID NO: 6735 - RNA, 21 nt, synthetic construct
  source 1..21: mol_type = other RNA
accagtgctgatcatttatat

SEQ ID NO: 6736 - RNA, 21 nt, synthetic construct
  source 1..21: mol_type = other RNA
accatgtatctgaaagacagt

SEQ ID NO: 6737 - RNA, 21 nt, synthetic construct
  source 1..21: mol_type = other RNA
acccatattttcctaatatgt

SEQ ID NO: 6738 - RNA, 21 nt, synthetic construct
  source 1..21: mol_type = other RNA
accccggaagtatactttgga

SEQ ID NO: 6739 - RNA, 21 nt, synthetic construct
  source 1..21: mol_type = other RNA
acccctacaattgcactggaa

SEQ ID NO: 6740 - RNA, 21 nt, synthetic construct
  source 1..21: mol_type = other RNA
accctcactgaatacaacatt

SEQ ID NO: 6741 - RNA, 21 nt, synthetic construct
  source 1..21: mol_type = other RNA
accctgtggtctcaaggtcca

SEQ ID NO: 6742 - RNA, 21 nt, synthetic construct
  source 1..21: mol_type = other RNA
acccttcttatacttcactcc

SEQ ID NO: 6743 - RNA, 21 nt, synthetic construct
  source 1..21: mol_type = other RNA
accgagaatgttgtattcagt

SEQ ID NO: 6744 - RNA, 21 nt, synthetic construct
  source 1..21: mol_type = other RNA
accgatggctcaggatatgca

SEQ ID NO: 6745 - RNA, 21 nt, synthetic construct
  source 1..21: mol_type = other RNA
acctaatgtttatgagccaga

SEQ ID NO: 6746 - RNA, 21 nt, synthetic construct
  source 1..21: mol_type = other RNA
acctatggaattgtcctgctt

SEQ ID NO: 6747 - RNA, 21 nt, synthetic construct
  source 1..21: mol_type = other RNA
acctcaaatgcatgtaagaag

SEQ ID NO: 6748 - RNA, 21 nt, synthetic construct
  source 1..21: mol_type = other RNA
acctcaagggggactgtcttt

SEQ ID NO: 6749 - RNA, 21 nt, synthetic construct
  source 1..21: mol_type = other RNA
acctctcaaggtgggccttgc

SEQ ID NO: 6750 - RNA, 21 nt, synthetic construct
  source 1..21: mol_type = other RNA
acctgaggatttaagggatgg

SEQ ID NO: 6751 - RNA, 21 nt, synthetic construct
  source 1..21: mol_type = other RNA
acctgcccctgagccacaagg

SEQ ID NO: 6752 - RNA, 21 nt, synthetic construct
  source 1..21: mol_type = other RNA
acctgggggcagtgttcaatc

SEQ ID NO: 6753 - RNA, 21 nt, synthetic construct
  source 1..21: mol_type = other RNA
acctggtagctgctttttcat

SEQ ID NO: 6754 - RNA, 21 nt, synthetic construct
  source 1..21: mol_type = other RNA
accttgagaccacagggttca

SEQ ID NO: 6755 - RNA, 21 nt, synthetic construct
  source 1..21: mol_type = other RNA
accttgagaggtgagttaaaa

SEQ ID NO: 6756 - RNA, 21 nt, synthetic construct
  source 1..21: mol_type = other RNA
accttgagttggacttgcctg

SEQ ID NO: 6757 - RNA, 21 nt, synthetic construct
  source 1..21: mol_type = other RNA
accttgtggctcaggggcagg

SEQ ID NO: 6758 - RNA, 21 nt, synthetic construct
  source 1..21: mol_type = other RNA
accttttaactcacctctcaa

SEQ ID NO: 6759 - RNA, 21 nt, synthetic construct
  source 1..21: mol_type = other RNA
acggaagaacatagaactctg

SEQ ID NO: 6760 - RNA, 21 nt, synthetic construct
  source 1..21: mol_type = other RNA
acgtatctgagctctctctgg

SEQ ID NO: 6761 - RNA, 21 nt, synthetic construct
  source 1..21: mol_type = other RNA
acgtctgagattcctcaaaat

SEQ ID NO: 6762 - RNA, 21 nt, synthetic construct
  source 1..21: mol_type = other RNA
acgttgacatataaatgatca

SEQ ID NO: 6763 - RNA, 21 nt, synthetic construct
  source 1..21: mol_type = other RNA
acgtttttcggcttatataag

SEQ ID NO: 6764 - RNA, 21 nt, synthetic construct
  source 1..21: mol_type = other RNA
actaaagagagaatgtagata

SEQ ID NO: 6765 - RNA, 21 nt, synthetic construct
  source 1..21: mol_type = other RNA
actaacagataagcaagagag

SEQ ID NO: 6766 - RNA, 21 nt, synthetic construct
  source 1..21: mol_type = other RNA
actaagatgagtgtagaacac

SEQ ID NO: 6767 - RNA, 21 nt, synthetic construct
  source 1..21: mol_type = other RNA
actactgggcagatgtgggcc

SEQ ID NO: 6768 - RNA, 21 nt, synthetic construct
  source 1..21: mol_type = other RNA
actagaggcttgcataataag

SEQ ID NO: 6769 - RNA, 21 nt, synthetic construct
  source 1..21: mol_type = other RNA
actattagagttgattgtcag

SEQ ID NO: 6770 - RNA, 21 nt, synthetic construct
  source 1..21: mol_type = other RNA
actattccttgttgaaagctc

SEQ ID NO: 6771 - RNA, 21 nt, synthetic construct
  source 1..21: mol_type = other RNA
actcaaggtccatgcctctgg

SEQ ID NO: 6772 - RNA, 21 nt, synthetic construct
  source 1..21: mol_type = other RNA
actcacctaatgtttatgagc

SEQ ID NO: 6773 - RNA, 21 nt, synthetic construct
  source 1..21: mol_type = other RNA
actcacctctcaaggtgggcc

SEQ ID NO: 6774 - RNA, 21 nt, synthetic construct
  source 1..21: mol_type = other RNA
actcatcttagtgcctgagag

SEQ ID NO: 6775 - RNA, 21 nt, synthetic construct
  source 1..21: mol_type = other RNA
actcatttcattcctaacaca

SEQ ID NO: 6776 - RNA, 21 nt, synthetic construct
  source 1..21: mol_type = other RNA
actccagaaagcaggacaatt

SEQ ID NO: 6777 - RNA, 21 nt, synthetic construct
  source 1..21: mol_type = other RNA
actctaagtatccccaggatc

SEQ ID NO: 6778 - RNA, 21 nt, synthetic construct
  source 1..21: mol_type = other RNA
actctcaggcactaagatgag

SEQ ID NO: 6779 - RNA, 21 nt, synthetic construct
  source 1..21: mol_type = other RNA
actctgggctgccatgtgaag

SEQ ID NO: 6780 - RNA, 21 nt, synthetic construct
  source 1..21: mol_type = other RNA
actgaatacaacattctcggt

SEQ ID NO: 6781 - RNA, 21 nt, synthetic construct
  source 1..21: mol_type = other RNA
actgcactactgggcagatgt

SEQ ID NO: 6782 - RNA, 21 nt, synthetic construct
  source 1..21: mol_type = other RNA
actgcccccaggtagctgctg

SEQ ID NO: 6783 - RNA, 21 nt, synthetic construct
  source 1..21: mol_type = other RNA
actggaaatacacatgctgtg

SEQ ID NO: 6784 - RNA, 21 nt, synthetic construct
  source 1..21: mol_type = other RNA
actggcagcatcttcacttct

SEQ ID NO: 6785 - RNA, 21 nt, synthetic construct
  source 1..21: mol_type = other RNA
actgggcagatgtgggcccgc

SEQ ID NO: 6786 - RNA, 21 nt, synthetic construct
  source 1..21: mol_type = other RNA
actgggctgtactttgtatat

SEQ ID NO: 6787 - RNA, 21 nt, synthetic construct
  source 1..21: mol_type = other RNA
actggtaagattgaacactgc

SEQ ID NO: 6788 - RNA, 21 nt, synthetic construct
  source 1..21: mol_type = other RNA
actgtctttcagatacatggt

SEQ ID NO: 6789 - RNA, 21 nt, synthetic construct
  source 1..21: mol_type = other RNA
acttagagttcctcatgtaga

SEQ ID NO: 6790 - RNA, 21 nt, synthetic construct
  source 1..21: mol_type = other RNA
acttcacaatatctacattct

SEQ ID NO: 6791 - RNA, 21 nt, synthetic construct
  source 1..21: mol_type = other RNA
acttcactccagaaagcagga

SEQ ID NO: 6792 - RNA, 21 nt, synthetic construct
  source 1..21: mol_type = other RNA
acttccggggtcaatcttgca

SEQ ID NO: 6793 - RNA, 21 nt, synthetic construct
  source 1..21: mol_type = other RNA
acttctaaatgcatatcctga

SEQ ID NO: 6794 - RNA, 21 nt, synthetic construct
  source 1..21: mol_type = other RNA
acttgacctcaaatgcatgta

SEQ ID NO: 6795 - RNA, 21 nt, synthetic construct
  source 1..21: mol_type = other RNA
acttgcctgaaataaatccaa

SEQ ID NO: 6796 - RNA, 21 nt, synthetic construct
  source 1..21: mol_type = other RNA
acttggttcatgtcttcttac

SEQ ID NO: 6797 - RNA, 21 nt, synthetic construct
  source 1..21: mol_type = other RNA
actttggaatatacaaagtac

SEQ ID NO: 6798 - RNA, 21 nt, synthetic construct
  source 1..21: mol_type = other RNA
actttgggattctttccatta

SEQ ID NO: 6799 - RNA, 21 nt, synthetic construct
  source 1..21: mol_type = other RNA
agaaagcaggacaattccata

SEQ ID NO: 6800 - RNA, 21 nt, synthetic construct
  source 1..21: mol_type = other RNA
agaacacctggtagctgcttt

SEQ ID NO: 6801 - RNA, 21 nt, synthetic construct
  source 1..21: mol_type = other RNA
agaacatagaactctgggctg

SEQ ID NO: 6802 - RNA, 21 nt, synthetic construct
  source 1..21: mol_type = other RNA
agaactctgggctgccatgtg

SEQ ID NO: 6803 - RNA, 21 nt, synthetic construct
  source 1..21: mol_type = other RNA
agaagacatgaaccaagtgga

SEQ ID NO: 6804 - RNA, 21 nt, synthetic construct
  source 1..21: mol_type = other RNA
agaagaccctcactgaataca

SEQ ID NO: 6805 - RNA, 21 nt, synthetic construct
  source 1..21: mol_type = other RNA
agaagcactttgggattcttt

SEQ ID NO: 6806 - RNA, 21 nt, synthetic construct
  source 1..21: mol_type = other RNA
agaagcatgaaaaagcagcta

SEQ ID NO: 6807 - RNA, 21 nt, synthetic construct
  source 1..21: mol_type = other RNA
agaagggtggccttgtgatca

SEQ ID NO: 6808 - RNA, 21 nt, synthetic construct
  source 1..21: mol_type = other RNA
agaagtgaagatgctgccagt

SEQ ID NO: 6809 - RNA, 21 nt, synthetic construct
  source 1..21: mol_type = other RNA
agaatcataatggaaagaatc

SEQ ID NO: 6810 - RNA, 21 nt, synthetic construct
  source 1..21: mol_type = other RNA
agaatcccaaagtgcttctct

SEQ ID NO: 6811 - RNA, 21 nt, synthetic construct
  source 1..21: mol_type = other RNA
agaatgtagatattgtgaagt

SEQ ID NO: 6812 - RNA, 21 nt, synthetic construct
  source 1..21: mol_type = other RNA
agaatgttgtattcagtgagg

SEQ ID NO: 6813 - RNA, 21 nt, synthetic construct
  source 1..21: mol_type = other RNA
agacaaatggaggaatatgac

SEQ ID NO: 6814 - RNA, 21 nt, synthetic construct
  source 1..21: mol_type = other RNA
agacacctatggaattgtcct

SEQ ID NO: 6815 - RNA, 21 nt, synthetic construct
  source 1..21: mol_type = other RNA
agacagtcccccttgaggtag

SEQ ID NO: 6816 - RNA, 21 nt, synthetic construct
  source 1..21: mol_type = other RNA
agacatgaaccaagtggacct

SEQ ID NO: 6817 - RNA, 21 nt, synthetic construct
  source 1..21: mol_type = other RNA
agacattttgaaccctgtggt

SEQ ID NO: 6818 - RNA, 21 nt, synthetic construct
  source 1..21: mol_type = other RNA
agaccacagggttcaaaatgt

SEQ ID NO: 6819 - RNA, 21 nt, synthetic construct
  source 1..21: mol_type = other RNA
agaccctcactgaatacaaca

SEQ ID NO: 6820 - RNA, 21 nt, synthetic construct
  source 1..21: mol_type = other RNA
agaccttgtggctcaggggca

SEQ ID NO: 6821 - RNA, 21 nt, synthetic construct
  source 1..21: mol_type = other RNA
agacgtttttcggcttatata

SEQ ID NO: 6822 - RNA, 21 nt, synthetic construct
  source 1..21: mol_type = other RNA
agactagaggcttgcataata

SEQ ID NO: 6823 - RNA, 21 nt, synthetic construct
  source 1..21: mol_type = other RNA
agagaagcactttgggattct

SEQ ID NO: 6824 - RNA, 21 nt, synthetic construct
  source 1..21: mol_type = other RNA
agagaatgtagatattgtgaa

SEQ ID NO: 6825 - RNA, 21 nt, synthetic construct
  source 1..21: mol_type = other RNA
agagagaatgtagatattgtg

SEQ ID NO: 6826 - RNA, 21 nt, synthetic construct
  source 1..21: mol_type = other RNA
agagagagctcagatacgttg

SEQ ID NO: 6827 - RNA, 21 nt, synthetic construct
  source 1..21: mol_type = other RNA
agagagatgttttggggactc

SEQ ID NO: 6828 - RNA, 21 nt, synthetic construct
  source 1..21: mol_type = other RNA
agagagctcagatacgttgac

SEQ ID NO: 6829 - RNA, 21 nt, synthetic construct
  source 1..21: mol_type = other RNA
agagatgttttggggactcat

SEQ ID NO: 6830 - RNA, 21 nt, synthetic construct
  source 1..21: mol_type = other RNA
agagctcagatacgttgacat

SEQ ID NO: 6831 - RNA, 21 nt, synthetic construct
  source 1..21: mol_type = other RNA
agagcttatataagccgaaaa

SEQ ID NO: 6832 - RNA, 21 nt, synthetic construct
  source 1..21: mol_type = other RNA
agaggcatggaccttgagttg

SEQ ID NO: 6833 - RNA, 21 nt, synthetic construct
  source 1..21: mol_type = other RNA
agaggccaatgccccactggc

SEQ ID NO: 6834 - RNA, 21 nt, synthetic construct
  source 1..21: mol_type = other RNA
agaggctgaaagaggccaatg

SEQ ID NO: 6835 - RNA, 21 nt, synthetic construct
  source 1..21: mol_type = other RNA
agaggcttgcataataagcta

SEQ ID NO: 6836 - RNA, 21 nt, synthetic construct
  source 1..21: mol_type = other RNA
agagggagaagcatgaaaaag

SEQ ID NO: 6837 - RNA, 21 nt, synthetic construct
  source 1..21: mol_type = other RNA
agaggtgagttaaaaggtgtc

SEQ ID NO: 6838 - RNA, 21 nt, synthetic construct
  source 1..21: mol_type = other RNA
agagtatttaggcagattgaa

SEQ ID NO: 6839 - RNA, 21 nt, synthetic construct
  source 1..21: mol_type = other RNA
agagttcctcatgtagacctt

SEQ ID NO: 6840 - RNA, 21 nt, synthetic construct
  source 1..21: mol_type = other RNA
agagttctatgttcttccgtc

SEQ ID NO: 6841 - RNA, 21 nt, synthetic construct
  source 1..21: mol_type = other RNA
agagttgattgtcaggaagca

SEQ ID NO: 6842 - RNA, 21 nt, synthetic construct
  source 1..21: mol_type = other RNA
agataagcaagagagatgttt

SEQ ID NO: 6843 - RNA, 21 nt, synthetic construct
  source 1..21: mol_type = other RNA
agatacatggttgtgacctga

SEQ ID NO: 6844 - RNA, 21 nt, synthetic construct
  source 1..21: mol_type = other RNA
agatacgttgacatataaatg

SEQ ID NO: 6845 - RNA, 21 nt, synthetic construct
  source 1..21: mol_type = other RNA
agatcctggggatacttagag

SEQ ID NO: 6846 - RNA, 21 nt, synthetic construct
  source 1..21: mol_type = other RNA
agatgagtgtagaacacctgg

SEQ ID NO: 6847 - RNA, 21 nt, synthetic construct
  source 1..21: mol_type = other RNA
agatgatgagctactgcacta

SEQ ID NO: 6848 - RNA, 21 nt, synthetic construct
  source 1..21: mol_type = other RNA
agatgctgccagtggggcatt

SEQ ID NO: 6849 - RNA, 21 nt, synthetic construct
  source 1..21: mol_type = other RNA
agatgtgcatttttgtgaaat

SEQ ID NO: 6850 - RNA, 21 nt, synthetic construct
  source 1..21: mol_type = other RNA
agatgtgggcccgcagcagct

SEQ ID NO: 6851 - RNA, 21 nt, synthetic construct
  source 1..21: mol_type = other RNA
agatgttttggggactcattt

SEQ ID NO: 6852 - RNA, 21 nt, synthetic construct
  source 1..21: mol_type = other RNA
agattcctcaaaattgaccag

SEQ ID NO: 6853 - RNA, 21 nt, synthetic construct
  source 1..21: mol_type = other RNA
agattgaaaaggacacctttt

SEQ ID NO: 6854 - RNA, 21 nt, synthetic construct
  source 1..21: mol_type = other RNA
agattgaacactgcccccagg

SEQ ID NO: 6855 - RNA, 21 nt, synthetic construct
  source 1..21: mol_type = other RNA
agattgaccccggaagtatac

SEQ ID NO: 6856 - RNA, 21 nt, synthetic construct
  source 1..21: mol_type = other RNA
agattttgaatgcttcctgac

SEQ ID NO: 6857 - RNA, 21 nt, synthetic construct
  source 1..21: mol_type = other RNA
agcaagagagatgttttgggg

SEQ ID NO: 6858 - RNA, 21 nt, synthetic construct
  source 1..21: mol_type = other RNA
agcaaggcccaccttgagagg

SEQ ID NO: 6859 - RNA, 21 nt, synthetic construct
  source 1..21: mol_type = other RNA
agcactattagagttgattgt

SEQ ID NO: 6860 - RNA, 21 nt, synthetic construct
  source 1..21: mol_type = other RNA
agcactggtaagattgaacac

SEQ ID NO: 6861 - RNA, 21 nt, synthetic construct
  source 1..21: mol_type = other RNA
agcactttgggattctttcca

SEQ ID NO: 6862 - RNA, 21 nt, synthetic construct
  source 1..21: mol_type = other RNA
agcagctaccaggtgttctac

SEQ ID NO: 6863 - RNA, 21 nt, synthetic construct
  source 1..21: mol_type = other RNA
agcagctacctgggggcagtg

SEQ ID NO: 6864 - RNA, 21 nt, synthetic construct
  source 1..21: mol_type = other RNA
agcaggacaattccataggtg

SEQ ID NO: 6865 - RNA, 21 nt, synthetic construct
  source 1..21: mol_type = other RNA
agcatcttcacttctaaatgc

SEQ ID NO: 6866 - RNA, 21 nt, synthetic construct
  source 1..21: mol_type = other RNA
agcatgaaaaagcagctacca

SEQ ID NO: 6867 - RNA, 21 nt, synthetic construct
  source 1..21: mol_type = other RNA
agcatgtgtatttccagtgca

SEQ ID NO: 6868 - RNA, 21 nt, synthetic construct
  source 1..21: mol_type = other RNA
agcattcaaaatcttgaccaa

SEQ ID NO: 6869 - RNA, 21 nt, synthetic construct
  source 1..21: mol_type = other RNA
agccacaaggtctacatgagg

SEQ ID NO: 6870 - RNA, 21 nt, synthetic construct
  source 1..21: mol_type = other RNA
agccagacaaatggaggaata

SEQ ID NO: 6871 - RNA, 21 nt, synthetic construct
  source 1..21: mol_type = other RNA
agccatcggtgaaactaacag

SEQ ID NO: 6872 - RNA, 21 nt, synthetic construct
  source 1..21: mol_type = other RNA
agcccagagttctatgttctt

SEQ ID NO: 6873 - RNA, 21 nt, synthetic construct
  source 1..21: mol_type = other RNA
agcccagtttcattgatcaca

SEQ ID NO: 6874 - RNA, 21 nt, synthetic construct
  source 1..21: mol_type = other RNA
agccgaaaaacgtctgagatt

SEQ ID NO: 6875 - RNA, 21 nt, synthetic construct
  source 1..21: mol_type = other RNA
agcctctagtcttccttttcc

SEQ ID NO: 6876 - RNA, 21 nt, synthetic construct
  source 1..21: mol_type = other RNA
agcctctttagcttattatgc

SEQ ID NO: 6877 - RNA, 21 nt, synthetic construct
  source 1..21: mol_type = other RNA
agctaaagaggctgaaagagg

SEQ ID NO: 6878 - RNA, 21 nt, synthetic construct
  source 1..21: mol_type = other RNA
agctacagacattttgaaccc

SEQ ID NO: 6879 - RNA, 21 nt, synthetic construct
  source 1..21: mol_type = other RNA
agctaccaggtgttctacact

SEQ ID NO: 6880 - RNA, 21 nt, synthetic construct
  source 1..21: mol_type = other RNA
agctacctgggggcagtgttc

SEQ ID NO: 6881 - RNA, 21 nt, synthetic construct
  source 1..21: mol_type = other RNA
agctactaatgatgttttcct

SEQ ID NO: 6882 - RNA, 21 nt, synthetic construct
  source 1..21: mol_type = other RNA
agctactgcactactgggcag

SEQ ID NO: 6883 - RNA, 21 nt, synthetic construct
  source 1..21: mol_type = other RNA
agctcagatacgttgacatat

SEQ ID NO: 6884 - RNA, 21 nt, synthetic construct
  source 1..21: mol_type = other RNA
agctcatcatcttcccctcca

SEQ ID NO: 6885 - RNA, 21 nt, synthetic construct
  source 1..21: mol_type = other RNA
agctcctcaactcacctaatg

SEQ ID NO: 6886 - RNA, 21 nt, synthetic construct
  source 1..21: mol_type = other RNA
agctccttttggatttatttc

SEQ ID NO: 6887 - RNA, 21 nt, synthetic construct
  source 1..21: mol_type = other RNA
agctctaagagaagcactttg

SEQ ID NO: 6888 - RNA, 21 nt, synthetic construct
  source 1..21: mol_type = other RNA
agctctctctggtcaattttg

SEQ ID NO: 6889 - RNA, 21 nt, synthetic construct
  source 1..21: mol_type = other RNA
agctgacaatcaatgattttt

SEQ ID NO: 6890 - RNA, 21 nt, synthetic construct
  source 1..21: mol_type = other RNA
agctgctgcgggcccacatct

SEQ ID NO: 6891 - RNA, 21 nt, synthetic construct
  source 1..21: mol_type = other RNA
agctgctttttcatgcttctc

SEQ ID NO: 6892 - RNA, 21 nt, synthetic construct
  source 1..21: mol_type = other RNA
agcttatataagccgaaaaac

SEQ ID NO: 6893 - RNA, 21 nt, synthetic construct
  source 1..21: mol_type = other RNA
agcttattatgcaagcctcta

SEQ ID NO: 6894 - RNA, 21 nt, synthetic construct
  source 1..21: mol_type = other RNA
aggaaaacatcattagtagct

SEQ ID NO: 6895 - RNA, 21 nt, synthetic construct
  source 1..21: mol_type = other RNA
aggaaaatatgggttgcattt

SEQ ID NO: 6896 - RNA, 21 nt, synthetic construct
  source 1..21: mol_type = other RNA
aggaactctaagtatccccag

SEQ ID NO: 6897 - RNA, 21 nt, synthetic construct
  source 1..21: mol_type = other RNA
aggaagactagaggcttgcat

SEQ ID NO: 6898 - RNA, 21 nt, synthetic construct
  source 1..21: mol_type = other RNA
aggaagcattcaaaatcttga

SEQ ID NO: 6899 - RNA, 21 nt, synthetic construct
  source 1..21: mol_type = other RNA
aggaatatgacggaagaacat

SEQ ID NO: 6900 - RNA, 21 nt, synthetic construct
  source 1..21: mol_type = other RNA
aggaatctcagacgtttttcg

SEQ ID NO: 6901 - RNA, 21 nt, synthetic construct
  source 1..21: mol_type = other RNA
aggaatgaaatgagtccccaa

SEQ ID NO: 6902 - RNA, 21 nt, synthetic construct
  source 1..21: mol_type = other RNA
aggacaattccataggtgtct

SEQ ID NO: 6903 - RNA, 21 nt, synthetic construct
  source 1..21: mol_type = other RNA
aggacaccttttaactcacct

SEQ ID NO: 6904 - RNA, 21 nt, synthetic construct
  source 1..21: mol_type = other RNA
aggagctacagacattttgaa

SEQ ID NO: 6905 - RNA, 21 nt, synthetic construct
  source 1..21: mol_type = other RNA
aggagctttcaacaaggaata

SEQ ID NO: 6906 - RNA, 21 nt, synthetic construct
  source 1..21: mol_type = other RNA
aggatatgcatttagaagtga

SEQ ID NO: 6907 - RNA, 21 nt, synthetic construct
  source 1..21: mol_type = other RNA
aggatctggtgatgatggagg

SEQ ID NO: 6908 - RNA, 21 nt, synthetic construct
  source 1..21: mol_type = other RNA
aggatttaagggatggaaaag

SEQ ID NO: 6909 - RNA, 21 nt, synthetic construct
  source 1..21: mol_type = other RNA
aggcaagtccaactcaaggtc

SEQ ID NO: 6910 - RNA, 21 nt, synthetic construct
  source 1..21: mol_type = other RNA
aggcaccgagaatgttgtatt

SEQ ID NO: 6911 - RNA, 21 nt, synthetic construct
  source 1..21: mol_type = other RNA
aggcactaagatgagtgtaga

SEQ ID NO: 6912 - RNA, 21 nt, synthetic construct
  source 1..21: mol_type = other RNA
aggcagattgaaaaggacacc

SEQ ID NO: 6913 - RNA, 21 nt, synthetic construct
  source 1..21: mol_type = other RNA
aggcatggaccttgagttgga

SEQ ID NO: 6914 - RNA, 21 nt, synthetic construct
  source 1..21: mol_type = other RNA
aggccaatgccccactggcag

SEQ ID NO: 6915 - RNA, 21 nt, synthetic construct
  source 1..21: mol_type = other RNA
aggccacccttcttatacttc

SEQ ID NO: 6916 - RNA, 21 nt, synthetic construct
  source 1..21: mol_type = other RNA
aggcccaccttgagaggtgag

SEQ ID NO: 6917 - RNA, 21 nt, synthetic construct
  source 1..21: mol_type = other RNA
aggctgaaagaggccaatgcc

SEQ ID NO: 6918 - RNA, 21 nt, synthetic construct
  source 1..21: mol_type = other RNA
aggcttgcataataagctaaa

SEQ ID NO: 6919 - RNA, 21 nt, synthetic construct
  source 1..21: mol_type = other RNA
agggagaagcatgaaaaagca

SEQ ID NO: 6920 - RNA, 21 nt, synthetic construct
  source 1..21: mol_type = other RNA
agggatggaaaaggaagacta

SEQ ID NO: 6921 - RNA, 21 nt, synthetic construct
  source 1..21: mol_type = other RNA
aggggaagatgatgagctact

SEQ ID NO: 6922 - RNA, 21 nt, synthetic construct
  source 1..21: mol_type = other RNA
aggggcaggttgttgcaagat

SEQ ID NO: 6923 - RNA, 21 nt, synthetic construct
  source 1..21: mol_type = other RNA
agggggactgtctttcagata

SEQ ID NO: 6924 - RNA, 21 nt, synthetic construct
  source 1..21: mol_type = other RNA
agggtcttcttacatgcattt

SEQ ID NO: 6925 - RNA, 21 nt, synthetic construct
  source 1..21: mol_type = other RNA
agggtggccttgtgatcaatg

SEQ ID NO: 6926 - RNA, 21 nt, synthetic construct
  source 1..21: mol_type = other RNA
agggttcaaaatgtctgtagc

SEQ ID NO: 6927 - RNA, 21 nt, synthetic construct
  source 1..21: mol_type = other RNA
aggtagcaaggcccaccttga

SEQ ID NO: 6928 - RNA, 21 nt, synthetic construct
  source 1..21: mol_type = other RNA
aggtagctgctgcgggcccac

SEQ ID NO: 6929 - RNA, 21 nt, synthetic construct
  source 1..21: mol_type = other RNA
aggtcaagtaagaagacatga

SEQ ID NO: 6930 - RNA, 21 nt, synthetic construct
  source 1..21: mol_type = other RNA
aggtcacaaccatgtatctga

SEQ ID NO: 6931 - RNA, 21 nt, synthetic construct
  source 1..21: mol_type = other RNA
aggtccacttggttcatgtct

SEQ ID NO: 6932 - RNA, 21 nt, synthetic construct
  source 1..21: mol_type = other RNA
aggtccatgcctctggaatgg

SEQ ID NO: 6933 - RNA, 21 nt, synthetic construct
  source 1..21: mol_type = other RNA
aggtctacatgaggaactcta

SEQ ID NO: 6934 - RNA, 21 nt, synthetic construct
  source 1..21: mol_type = other RNA
aggtgagttaaaaggtgtcct

SEQ ID NO: 6935 - RNA, 21 nt, synthetic construct
  source 1..21: mol_type = other RNA
aggtgagttgaggagctacag

SEQ ID NO: 6936 - RNA, 21 nt, synthetic construct
  source 1..21: mol_type = other RNA
aggtgggccttgctacctcaa

SEQ ID NO: 6937 - RNA, 21 nt, synthetic construct
  source 1..21: mol_type = other RNA
aggtgtccttttcaatctgcc

SEQ ID NO: 6938 - RNA, 21 nt, synthetic construct
  source 1..21: mol_type = other RNA
aggtgtcttcccattccagag

SEQ ID NO: 6939 - RNA, 21 nt, synthetic construct
  source 1..21: mol_type = other RNA
aggtgttctacactcatctta

SEQ ID NO: 6940 - RNA, 21 nt, synthetic construct
  source 1..21: mol_type = other RNA
aggttgttgcaagattgaccc

SEQ ID NO: 6941 - RNA, 21 nt, synthetic construct
  source 1..21: mol_type = other RNA
agtaagaagacatgaaccaag

SEQ ID NO: 6942 - RNA, 21 nt, synthetic construct
  source 1..21: mol_type = other RNA
agtacagcccagtttcattga

SEQ ID NO: 6943 - RNA, 21 nt, synthetic construct
  source 1..21: mol_type = other RNA
agtagctcatcatcttcccct

SEQ ID NO: 6944 - RNA, 21 nt, synthetic construct
  source 1..21: mol_type = other RNA
agtagctgacaatcaatgatt

SEQ ID NO: 6945 - RNA, 21 nt, synthetic construct
  source 1..21: mol_type = other RNA
agtagtgcagtagctcatcat

SEQ ID NO: 6946 - RNA, 21 nt, synthetic construct
  source 1..21: mol_type = other RNA
agtataagaagggtggccttg

SEQ ID NO: 6947 - RNA, 21 nt, synthetic construct
  source 1..21: mol_type = other RNA
agtatacttccggggtcaatc

SEQ ID NO: 6948 - RNA, 21 nt, synthetic construct
  source 1..21: mol_type = other RNA
agtatccccaggatctggtga

SEQ ID NO: 6949 - RNA, 21 nt, synthetic construct
  source 1..21: mol_type = other RNA
agtatttaggcagattgaaaa

SEQ ID NO: 6950 - RNA, 21 nt, synthetic construct
  source 1..21: mol_type = other RNA
agtccaactcaaggtccatgc

SEQ ID NO: 6951 - RNA, 21 nt, synthetic construct
  source 1..21: mol_type = other RNA
agtccccaaaacatctctctt

SEQ ID NO: 6952 - RNA, 21 nt, synthetic construct
  source 1..21: mol_type = other RNA
agtcccccttgaggtagcaag

SEQ ID NO: 6953 - RNA, 21 nt, synthetic construct
  source 1..21: mol_type = other RNA
agtcttccttttccatccctt

SEQ ID NO: 6954 - RNA, 21 nt, synthetic construct
  source 1..21: mol_type = other RNA
agtgaagatgctgccagtggg

SEQ ID NO: 6955 - RNA, 21 nt, synthetic construct
  source 1..21: mol_type = other RNA
agtgaagtataagaagggtgg

SEQ ID NO: 6956 - RNA, 21 nt, synthetic construct
  source 1..21: mol_type = other RNA
agtgagggtcttcttacatgc

SEQ ID NO: 6957 - RNA, 21 nt, synthetic construct
  source 1..21: mol_type = other RNA
agtgcaattgtaggggtgtgt

SEQ ID NO: 6958 - RNA, 21 nt, synthetic construct
  source 1..21: mol_type = other RNA
agtgcagtagctcatcatctt

SEQ ID NO: 6959 - RNA, 21 nt, synthetic construct
  source 1..21: mol_type = other RNA
agtgcctgagagtatttaggc

SEQ ID NO: 6960 - RNA, 21 nt, synthetic construct
  source 1..21: mol_type = other RNA
agtgctgatcatttatatgtc

SEQ ID NO: 6961 - RNA, 21 nt, synthetic construct
  source 1..21: mol_type = other RNA
agtgcttctcttagagcttat

SEQ ID NO: 6962 - RNA, 21 nt, synthetic construct
  source 1..21: mol_type = other RNA
agtggaccttgagaccacagg

SEQ ID NO: 6963 - RNA, 21 nt, synthetic construct
  source 1..21: mol_type = other RNA
agtggggcattggcctctttc

SEQ ID NO: 6964 - RNA, 21 nt, synthetic construct
  source 1..21: mol_type = other RNA
agtgtagaacacctggtagct

SEQ ID NO: 6965 - RNA, 21 nt, synthetic construct
  source 1..21: mol_type = other RNA
agtgttcaatcttaccagtgc

SEQ ID NO: 6966 - RNA, 21 nt, synthetic construct
  source 1..21: mol_type = other RNA
agttaaaaggtgtccttttca

SEQ ID NO: 6967 - RNA, 21 nt, synthetic construct
  source 1..21: mol_type = other RNA
agttcctcatgtagaccttgt

SEQ ID NO: 6968 - RNA, 21 nt, synthetic construct
  source 1..21: mol_type = other RNA
agttctatgttcttccgtcat

SEQ ID NO: 6969 - RNA, 21 nt, synthetic construct
  source 1..21: mol_type = other RNA
agttgaggagctacagacatt

SEQ ID NO: 6970 - RNA, 21 nt, synthetic construct
  source 1..21: mol_type = other RNA
agttgattgtcaggaagcatt

SEQ ID NO: 6971 - RNA, 21 nt, synthetic construct
  source 1..21: mol_type = other RNA
agttggacttgcctgaaataa

SEQ ID NO: 6972 - RNA, 21 nt, synthetic construct
  source 1..21: mol_type = other RNA
agtttcaccgatggctcagga

SEQ ID NO: 6973 - RNA, 21 nt, synthetic construct
  source 1..21: mol_type = other RNA
agtttcattgatcacaaggcc

SEQ ID NO: 6974 - RNA, 21 nt, synthetic construct
  source 1..21: mol_type = other RNA
ataaacattaggtgagttgag

SEQ ID NO: 6975 - RNA, 21 nt, synthetic construct
  source 1..21: mol_type = other RNA
ataaatccaaaaggagctttc

SEQ ID NO: 6976 - RNA, 21 nt, synthetic construct
  source 1..21: mol_type = other RNA
ataaatgatcagcactggtaa

SEQ ID NO: 6977 - RNA, 21 nt, synthetic construct
  source 1..21: mol_type = other RNA
ataagaagggtggccttgtga

SEQ ID NO: 6978 - RNA, 21 nt, synthetic construct
  source 1..21: mol_type = other RNA
ataagcaagagagatgttttg

SEQ ID NO: 6979 - RNA, 21 nt, synthetic construct
  source 1..21: mol_type = other RNA
ataagccgaaaaacgtctgag

SEQ ID NO: 6980 - RNA, 21 nt, synthetic construct
  source 1..21: mol_type = other RNA
ataagctaaagaggctgaaag

SEQ ID NO: 6981 - RNA, 21 nt, synthetic construct
  source 1..21: mol_type = other RNA
ataagctctaagagaagcact

SEQ ID NO: 6982 - RNA, 21 nt, synthetic construct
  source 1..21: mol_type = other RNA
ataataagctaaagaggctga

SEQ ID NO: 6983 - RNA, 21 nt, synthetic construct
  source 1..21: mol_type = other RNA
ataatggaaagaatcccaaag

SEQ ID NO: 6984 - RNA, 21 nt, synthetic construct
  source 1..21: mol_type = other RNA
atacaaagtacagcccagttt

SEQ ID NO: 6985 - RNA, 21 nt, synthetic construct
  source 1..21: mol_type = other RNA
atacaacattctcggtgcctg

SEQ ID NO: 6986 - RNA, 21 nt, synthetic construct
  source 1..21: mol_type = other RNA
atacacatgctgtgttaggaa

SEQ ID NO: 6987 - RNA, 21 nt, synthetic construct
  source 1..21: mol_type = other RNA
atacatggttgtgacctgagg

SEQ ID NO: 6988 - RNA, 21 nt, synthetic construct
  source 1..21: mol_type = other RNA
atactctcaggcactaagatg

SEQ ID NO: 6989 - RNA, 21 nt, synthetic construct
  source 1..21: mol_type = other RNA
atacttagagttcctcatgta

SEQ ID NO: 6990 - RNA, 21 nt, synthetic construct
  source 1..21: mol_type = other RNA
atacttcactccagaaagcag

SEQ ID NO: 6991 - RNA, 21 nt, synthetic construct
  source 1..21: mol_type = other RNA
atacttccggggtcaatcttg

SEQ ID NO: 6992 - RNA, 21 nt, synthetic construct
  source 1..21: mol_type = other RNA
atagaactctgggctgccatg

SEQ ID NO: 6993 - RNA, 21 nt, synthetic construct
  source 1..21: mol_type = other RNA
ataggaaaacatcattagtag

SEQ ID NO: 6994 - RNA, 21 nt, synthetic construct
  source 1..21: mol_type = other RNA
ataggtgtcttcccattccag

SEQ ID NO: 6995 - RNA, 21 nt, synthetic construct
  source 1..21: mol_type = other RNA
atataaatgatcagcactggt

SEQ ID NO: 6996 - RNA, 21 nt, synthetic construct
  source 1..21: mol_type = other RNA
atataagccgaaaaacgtctg

SEQ ID NO: 6997 - RNA, 21 nt, synthetic construct
  source 1..21: mol_type = other RNA
atataagctctaagagaagca

SEQ ID NO: 6998 - RNA, 21 nt, synthetic construct
  source 1..21: mol_type = other RNA
atatacaaagtacagcccagt

SEQ ID NO: 6999 - RNA, 21 nt, synthetic construct
  source 1..21: mol_type = other RNA
atatcctgagccatcggtgaa

SEQ ID NO: 7000 - RNA, 21 nt, synthetic construct
  source 1..21: mol_type = other RNA
atatctacattctctctttag

SEQ ID NO: 7001 - RNA, 21 nt, synthetic construct
  source 1..21: mol_type = other RNA
atatgacggaagaacatagaa

SEQ ID NO: 7002 - RNA, 21 nt, synthetic construct
  source 1..21: mol_type = other RNA
atatgcatttagaagtgaaga

SEQ ID NO: 7003 - RNA, 21 nt, synthetic construct
  source 1..21: mol_type = other RNA
atatgggttgcatttggtcaa

SEQ ID NO: 7004 - RNA, 21 nt, synthetic construct
  source 1..21: mol_type = other RNA
atatgtcaacgtatctgagct

SEQ ID NO: 7005 - RNA, 21 nt, synthetic construct
  source 1..21: mol_type = other RNA
atattaggaaaatatgggttg

SEQ ID NO: 7006 - RNA, 21 nt, synthetic construct
  source 1..21: mol_type = other RNA
atattccaaagtatacttccg

SEQ ID NO: 7007 - RNA, 21 nt, synthetic construct
  source 1..21: mol_type = other RNA
atattcctccatttgtctggc

SEQ ID NO: 7008 - RNA, 21 nt, synthetic construct
  source 1..21: mol_type = other RNA
atcaactctaatagtgcttaa

SEQ ID NO: 7009 - RNA, 21 nt, synthetic construct
  source 1..21: mol_type = other RNA
atcaatgaaactgggctgtac

SEQ ID NO: 7010 - RNA, 21 nt, synthetic construct
  source 1..21: mol_type = other RNA
atcacaaggccacccttctta

SEQ ID NO: 7011 - RNA, 21 nt, synthetic construct
  source 1..21: mol_type = other RNA
atcaccagatcctggggatac

SEQ ID NO: 7012 - RNA, 21 nt, synthetic construct
  source 1..21: mol_type = other RNA
atcagcactggtaagattgaa

SEQ ID NO: 7013 - RNA, 21 nt, synthetic construct
  source 1..21: mol_type = other RNA
atcataatggaaagaatccca

SEQ ID NO: 7014 - RNA, 21 nt, synthetic construct
  source 1..21: mol_type = other RNA
atcatcaccagatcctgggga

SEQ ID NO: 7015 - RNA, 21 nt, synthetic construct
  source 1..21: mol_type = other RNA
atcatcttcccctccatcatc

SEQ ID NO: 7016 - RNA, 21 nt, synthetic construct
  source 1..21: mol_type = other RNA
atcattagtagctgacaatca

SEQ ID NO: 7017 - RNA, 21 nt, synthetic construct
  source 1..21: mol_type = other RNA
atcattgattgtcagctacta

SEQ ID NO: 7018 - RNA, 21 nt, synthetic construct
  source 1..21: mol_type = other RNA
atccaaaaggagctttcaaca

SEQ ID NO: 7019 - RNA, 21 nt, synthetic construct
  source 1..21: mol_type = other RNA
atcccaaagtgcttctcttag

SEQ ID NO: 7020 - RNA, 21 nt, synthetic construct
  source 1..21: mol_type = other RNA
atccccaggatctggtgatga

SEQ ID NO: 7021 - RNA, 21 nt, synthetic construct
  source 1..21: mol_type = other RNA
atcccttaaatcctcaggtca

SEQ ID NO: 7022 - RNA, 21 nt, synthetic construct
  source 1..21: mol_type = other RNA
atcctcaggtcacaaccatgt

SEQ ID NO: 7023 - RNA, 21 nt, synthetic construct
  source 1..21: mol_type = other RNA
atcctgagccatcggtgaaac

SEQ ID NO: 7024 - RNA, 21 nt, synthetic construct
  source 1..21: mol_type = other RNA
atcctggggatacttagagtt

SEQ ID NO: 7025 - RNA, 21 nt, synthetic construct
  source 1..21: mol_type = other RNA
atcggtgaaactaacagataa

SEQ ID NO: 7026 - RNA, 21 nt, synthetic construct
  source 1..21: mol_type = other RNA
atctacattctctctttagtc

SEQ ID NO: 7027 - RNA, 21 nt, synthetic construct
  source 1..21: mol_type = other RNA
atctcagacgtttttcggctt

SEQ ID NO: 7028 - RNA, 21 nt, synthetic construct
  source 1..21: mol_type = other RNA
atctctcttgcttatctgtta

SEQ ID NO: 7029 - RNA, 21 nt, synthetic construct
  source 1..21: mol_type = other RNA
atctgaaagacagtccccctt

SEQ ID NO: 7030 - RNA, 21 nt, synthetic construct
  source 1..21: mol_type = other RNA
atctgagctctctctggtcaa

SEQ ID NO: 7031 - RNA, 21 nt, synthetic construct
  source 1..21: mol_type = other RNA
atctgcccagtagtgcagtag

SEQ ID NO: 7032 - RNA, 21 nt, synthetic construct
  source 1..21: mol_type = other RNA
atctgcctaaatactctcagg

SEQ ID NO: 7033 - RNA, 21 nt, synthetic construct
  source 1..21: mol_type = other RNA
atctggtgatgatggagggga

SEQ ID NO: 7034 - RNA, 21 nt, synthetic construct
  source 1..21: mol_type = other RNA
atctgttagtttcaccgatgg

SEQ ID NO: 7035 - RNA, 21 nt, synthetic construct
  source 1..21: mol_type = other RNA
atcttaccagtgctgatcatt

SEQ ID NO: 7036 - RNA, 21 nt, synthetic construct
  source 1..21: mol_type = other RNA
atcttagtgcctgagagtatt

SEQ ID NO: 7037 - RNA, 21 nt, synthetic construct
  source 1..21: mol_type = other RNA
atcttcacttctaaatgcata

SEQ ID NO: 7038 - RNA, 21 nt, synthetic construct
  source 1..21: mol_type = other RNA
atcttcccctccatcatcacc

SEQ ID NO: 7039 - RNA, 21 nt, synthetic construct
  source 1..21: mol_type = other RNA
atcttgaccaaatgcaaccca

SEQ ID NO: 7040 - RNA, 21 nt, synthetic construct
  source 1..21: mol_type = other RNA
atcttgcaacaacctgcccct

SEQ ID NO: 7041 - RNA, 21 nt, synthetic construct
  source 1..21: mol_type = other RNA
atgaaaaagcagctaccaggt

SEQ ID NO: 7042 - RNA, 21 nt, synthetic construct
  source 1..21: mol_type = other RNA
atgaaactgggctgtactttg

SEQ ID NO: 7043 - RNA, 21 nt, synthetic construct
  source 1..21: mol_type = other RNA
atgaaatgagtccccaaaaca

SEQ ID NO: 7044 - RNA, 21 nt, synthetic construct
  source 1..21: mol_type = other RNA
atgaaccaagtggaccttgag

SEQ ID NO: 7045 - RNA, 21 nt, synthetic construct
  source 1..21: mol_type = other RNA
atgacggaagaacatagaact

SEQ ID NO: 7046 - RNA, 21 nt, synthetic construct
  source 1..21: mol_type = other RNA
atgactaaagagagaatgtag

SEQ ID NO: 7047 - RNA, 21 nt, synthetic construct
  source 1..21: mol_type = other RNA
atgactattccttgttgaaag

SEQ ID NO: 7048 - RNA, 21 nt, synthetic construct
  source 1..21: mol_type = other RNA
atgagccagacaaatggagga

SEQ ID NO: 7049 - RNA, 21 nt, synthetic construct
  source 1..21: mol_type = other RNA
atgagctactgcactactggg

SEQ ID NO: 7050 - RNA, 21 nt, synthetic construct
  source 1..21: mol_type = other RNA
atgaggaactctaagtatccc

SEQ ID NO: 7051 - RNA, 21 nt, synthetic construct
  source 1..21: mol_type = other RNA
atgagtccccaaaacatctct

SEQ ID NO: 7052 - RNA, 21 nt, synthetic construct
  source 1..21: mol_type = other RNA
atgagtgtagaacacctggta

SEQ ID NO: 7053 - RNA, 21 nt, synthetic construct
  source 1..21: mol_type = other RNA
atgatcagcactggtaagatt

SEQ ID NO: 7054 - RNA, 21 nt, synthetic construct
  source 1..21: mol_type = other RNA
atgatgagctactgcactact

SEQ ID NO: 7055 - RNA, 21 nt, synthetic construct
  source 1..21: mol_type = other RNA
atgatggaggggaagatgatg

SEQ ID NO: 7056 - RNA, 21 nt, synthetic construct
  source 1..21: mol_type = other RNA
atgattctttgttacaggcac

SEQ ID NO: 7057 - RNA, 21 nt, synthetic construct
  source 1..21: mol_type = other RNA
atgcaacccatattttcctaa

SEQ ID NO: 7058 - RNA, 21 nt, synthetic construct
  source 1..21: mol_type = other RNA
atgcaagcctctagtcttcct

SEQ ID NO: 7059 - RNA, 21 nt, synthetic construct
  source 1..21: mol_type = other RNA
atgcatatcctgagccatcgg

SEQ ID NO: 7060 - RNA, 21 nt, synthetic construct
  source 1..21: mol_type = other RNA
atgcatgactattccttgttg

SEQ ID NO: 7061 - RNA, 21 nt, synthetic construct
  source 1..21: mol_type = other RNA
atgcatgtaagaagaccctca

SEQ ID NO: 7062 - RNA, 21 nt, synthetic construct
  source 1..21: mol_type = other RNA
atgcatttagaagtgaagatg

SEQ ID NO: 7063 - RNA, 21 nt, synthetic construct
  source 1..21: mol_type = other RNA
atgcatttgaggtcaagtaag

SEQ ID NO: 7064 - RNA, 21 nt, synthetic construct
  source 1..21: mol_type = other RNA
atgccccactggcagcatctt

SEQ ID NO: 7065 - RNA, 21 nt, synthetic construct
  source 1..21: mol_type = other RNA
atgcctctggaatgggaagac

SEQ ID NO: 7066 - RNA, 21 nt, synthetic construct
  source 1..21: mol_type = other RNA
atgctgccagtggggcattgg

SEQ ID NO: 7067 - RNA, 21 nt, synthetic construct
  source 1..21: mol_type = other RNA
atgctgtgttaggaatgaaat

SEQ ID NO: 7068 - RNA, 21 nt, synthetic construct
  source 1..21: mol_type = other RNA
atgcttcctgacaatcaactc

SEQ ID NO: 7069 - RNA, 21 nt, synthetic construct
  source 1..21: mol_type = other RNA
atgcttctccctcttcacatg

SEQ ID NO: 7070 - RNA, 21 nt, synthetic construct
  source 1..21: mol_type = other RNA
atggaaaaggaagactagagg

SEQ ID NO: 7071 - RNA, 21 nt, synthetic construct
  source 1..21: mol_type = other RNA
atggaaagaatcccaaagtgc

SEQ ID NO: 7072 - RNA, 21 nt, synthetic construct
  source 1..21: mol_type = other RNA
atggaattgtcctgctttctg

SEQ ID NO: 7073 - RNA, 21 nt, synthetic construct
  source 1..21: mol_type = other RNA
atggaccttgagttggacttg

SEQ ID NO: 7074 - RNA, 21 nt, synthetic construct
  source 1..21: mol_type = other RNA
atggaggaatatgacggaaga

SEQ ID NO: 7075 - RNA, 21 nt, synthetic construct
  source 1..21: mol_type = other RNA
atggaggggaagatgatgagc

SEQ ID NO: 7076 - RNA, 21 nt, synthetic construct
  source 1..21: mol_type = other RNA
atggcagcccagagttctatg

SEQ ID NO: 7077 - RNA, 21 nt, synthetic construct
  source 1..21: mol_type = other RNA
atggctcaggatatgcattta

SEQ ID NO: 7078 - RNA, 21 nt, synthetic construct
  source 1..21: mol_type = other RNA
atgggaagacacctatggaat

SEQ ID NO: 7079 - RNA, 21 nt, synthetic construct
  source 1..21: mol_type = other RNA
atgggttgcatttggtcaaga

SEQ ID NO: 7080 - RNA, 21 nt, synthetic construct
  source 1..21: mol_type = other RNA
atggttgtgacctgaggattt

SEQ ID NO: 7081 - RNA, 21 nt, synthetic construct
  source 1..21: mol_type = other RNA
atgtaagaagaccctcactga

SEQ ID NO: 7082 - RNA, 21 nt, synthetic construct
  source 1..21: mol_type = other RNA
atgtacttcacaatatctaca

SEQ ID NO: 7083 - RNA, 21 nt, synthetic construct
  source 1..21: mol_type = other RNA
atgtagaccttgtggctcagg

SEQ ID NO: 7084 - RNA, 21 nt, synthetic construct
  source 1..21: mol_type = other RNA
atgtagatattgtgaagtaca

SEQ ID NO: 7085 - RNA, 21 nt, synthetic construct
  source 1..21: mol_type = other RNA
atgtagatgtgcatttttgtg

SEQ ID NO: 7086 - RNA, 21 nt, synthetic construct
  source 1..21: mol_type = other RNA
atgtatctgaaagacagtccc

SEQ ID NO: 7087 - RNA, 21 nt, synthetic construct
  source 1..21: mol_type = other RNA
atgtcaacgtatctgagctct

SEQ ID NO: 7088 - RNA, 21 nt, synthetic construct
  source 1..21: mol_type = other RNA
atgtctgtagctcctcaactc

SEQ ID NO: 7089 - RNA, 21 nt, synthetic construct
  source 1..21: mol_type = other RNA
atgtcttcttacttgacctca

SEQ ID NO: 7090 - RNA, 21 nt, synthetic construct
  source 1..21: mol_type = other RNA
atgtgaagagggagaagcatg

SEQ ID NO: 7091 - RNA, 21 nt, synthetic construct
  source 1..21: mol_type = other RNA
atgtgcatttttgtgaaatga

SEQ ID NO: 7092 - RNA, 21 nt, synthetic construct
  source 1..21: mol_type = other RNA
atgtgggcccgcagcagctac

SEQ ID NO: 7093 - RNA, 21 nt, synthetic construct
  source 1..21: mol_type = other RNA
atgtgtatttccagtgcaatt

SEQ ID NO: 7094 - RNA, 21 nt, synthetic construct
  source 1..21: mol_type = other RNA
atgttcttccgtcatattcct

SEQ ID NO: 7095 - RNA, 21 nt, synthetic construct
  source 1..21: mol_type = other RNA
atgttgtattcagtgagggtc

SEQ ID NO: 7096 - RNA, 21 nt, synthetic construct
  source 1..21: mol_type = other RNA
atgtttatgagccagacaaat

SEQ ID NO: 7097 - RNA, 21 nt, synthetic construct
  source 1..21: mol_type = other RNA
atgttttggggactcatttca

SEQ ID NO: 7098 - RNA, 21 nt, synthetic construct
  source 1..21: mol_type = other RNA
attagagttgattgtcaggaa

SEQ ID NO: 7099 - RNA, 21 nt, synthetic construct
  source 1..21: mol_type = other RNA
attaggaaaatatgggttgca

SEQ ID NO: 7100 - RNA, 21 nt, synthetic construct
  source 1..21: mol_type = other RNA
attaggtgagttgaggagcta

SEQ ID NO: 7101 - RNA, 21 nt, synthetic construct
  source 1..21: mol_type = other RNA
attagtagctgacaatcaatg

SEQ ID NO: 7102 - RNA, 21 nt, synthetic construct
  source 1..21: mol_type = other RNA
attatgattctttgttacagg

SEQ ID NO: 7103 - RNA, 21 nt, synthetic construct
  source 1..21: mol_type = other RNA
attatgcaagcctctagtctt

SEQ ID NO: 7104 - RNA, 21 nt, synthetic construct
  source 1..21: mol_type = other RNA
attcaaaatcttgaccaaatg

SEQ ID NO: 7105 - RNA, 21 nt, synthetic construct
  source 1..21: mol_type = other RNA
attcagtgagggtcttcttac

SEQ ID NO: 7106 - RNA, 21 nt, synthetic construct
  source 1..21: mol_type = other RNA
attccaaagtatacttccggg

SEQ ID NO: 7107 - RNA, 21 nt, synthetic construct
  source 1..21: mol_type = other RNA
attccagaggcatggaccttg

SEQ ID NO: 7108 - RNA, 21 nt, synthetic construct
  source 1..21: mol_type = other RNA
attccataggtgtcttcccat

SEQ ID NO: 7109 - RNA, 21 nt, synthetic construct
  source 1..21: mol_type = other RNA
attcctaacacagcatgtgta

SEQ ID NO: 7110 - RNA, 21 nt, synthetic construct
  source 1..21: mol_type = other RNA
attcctcaaaattgaccagag

SEQ ID NO: 7111 - RNA, 21 nt, synthetic construct
  source 1..21: mol_type = other RNA
attcctccatttgtctggctc

SEQ ID NO: 7112 - RNA, 21 nt, synthetic construct
  source 1..21: mol_type = other RNA
attccttgttgaaagctcctt

SEQ ID NO: 7113 - RNA, 21 nt, synthetic construct
  source 1..21: mol_type = other RNA
attctcggtgcctgtaacaaa

SEQ ID NO: 7114 - RNA, 21 nt, synthetic construct
  source 1..21: mol_type = other RNA
attctctctttagtcatacac

SEQ ID NO: 7115 - RNA, 21 nt, synthetic construct
  source 1..21: mol_type = other RNA
attctttgttacaggcaccga

SEQ ID NO: 7116 - RNA, 21 nt, synthetic construct
  source 1..21: mol_type = other RNA
attgaaaaggacaccttttaa

SEQ ID NO: 7117 - RNA, 21 nt, synthetic construct
  source 1..21: mol_type = other RNA
attgaacactgcccccaggta

SEQ ID NO: 7118 - RNA, 21 nt, synthetic construct
  source 1..21: mol_type = other RNA
attgaccagagagagctcaga

SEQ ID NO: 7119 - RNA, 21 nt, synthetic construct
  source 1..21: mol_type = other RNA
attgaccccggaagtatactt

SEQ ID NO: 7120 - RNA, 21 nt, synthetic construct
  source 1..21: mol_type = other RNA
attgatcacaaggccaccctt

SEQ ID NO: 7121 - RNA, 21 nt, synthetic construct
  source 1..21: mol_type = other RNA
attgattgtcagctactaatg

SEQ ID NO: 7122 - RNA, 21 nt, synthetic construct
  source 1..21: mol_type = other RNA
attgcactggaaatacacatg

SEQ ID NO: 7123 - RNA, 21 nt, synthetic construct
  source 1..21: mol_type = other RNA
attggcctctttcagcctctt

SEQ ID NO: 7124 - RNA, 21 nt, synthetic construct
  source 1..21: mol_type = other RNA
attgtcagctactaatgatgt

SEQ ID NO: 7125 - RNA, 21 nt, synthetic construct
  source 1..21: mol_type = other RNA
attgtcaggaagcattcaaaa

SEQ ID NO: 7126 - RNA, 21 nt, synthetic construct
  source 1..21: mol_type = other RNA
attgtcctgctttctggagtg

SEQ ID NO: 7127 - RNA, 21 nt, synthetic construct
  source 1..21: mol_type = other RNA
attgtgaagtacatattagga

SEQ ID NO: 7128 - RNA, 21 nt, synthetic construct
  source 1..21: mol_type = other RNA
atttaagggatggaaaaggaa

SEQ ID NO: 7129 - RNA, 21 nt, synthetic construct
  source 1..21: mol_type = other RNA
atttagaagtgaagatgctgc

SEQ ID NO: 7130 - RNA, 21 nt, synthetic construct
  source 1..21: mol_type = other RNA
atttaggcagattgaaaagga

SEQ ID NO: 7131 - RNA, 21 nt, synthetic construct
  source 1..21: mol_type = other RNA
atttatatgtcaacgtatctg

SEQ ID NO: 7132 - RNA, 21 nt, synthetic construct
  source 1..21: mol_type = other RNA
atttatttcaggcaagtccaa

SEQ ID NO: 7133 - RNA, 21 nt, synthetic construct
  source 1..21: mol_type = other RNA
atttcacaaaaatgcacatct

SEQ ID NO: 7134 - RNA, 21 nt, synthetic construct
  source 1..21: mol_type = other RNA
atttcaggcaagtccaactca

SEQ ID NO: 7135 - RNA, 21 nt, synthetic construct
  source 1..21: mol_type = other RNA
atttcattcctaacacagcat

SEQ ID NO: 7136 - RNA, 21 nt, synthetic construct
  source 1..21: mol_type = other RNA
atttccagtgcaattgtaggg

SEQ ID NO: 7137 - RNA, 21 nt, synthetic construct
  source 1..21: mol_type = other RNA
atttgaggtcaagtaagaaga

SEQ ID NO: 7138 - RNA, 21 nt, synthetic construct
  source 1..21: mol_type = other RNA
atttggtcaagattttgaatg

SEQ ID NO: 7139 - RNA, 21 nt, synthetic construct
  source 1..21: mol_type = other RNA
atttgtctggctcataaacat

SEQ ID NO: 7140 - RNA, 21 nt, synthetic construct
  source 1..21: mol_type = other RNA
attttgaaccctgtggtctca

SEQ ID NO: 7141 - RNA, 21 nt, synthetic construct
  source 1..21: mol_type = other RNA
attttgaatgcttcctgacaa

SEQ ID NO: 7142 - RNA, 21 nt, synthetic construct
  source 1..21: mol_type = other RNA
attttgaggaatctcagacgt

SEQ ID NO: 7143 - RNA, 21 nt, synthetic construct
  source 1..21: mol_type = other RNA
caaaaatgcacatctacataa

SEQ ID NO: 7144 - RNA, 21 nt, synthetic construct
  source 1..21: mol_type = other RNA
caaaacatctctcttgcttat

SEQ ID NO: 7145 - RNA, 21 nt, synthetic construct
  source 1..21: mol_type = other RNA
caaaaggagctttcaacaagg

SEQ ID NO: 7146 - RNA, 21 nt, synthetic construct
  source 1..21: mol_type = other RNA
caaaatcttgaccaaatgcaa

SEQ ID NO: 7147 - RNA, 21 nt, synthetic construct
  source 1..21: mol_type = other RNA
caaaatgtctgtagctcctca

SEQ ID NO: 7148 - RNA, 21 nt, synthetic construct
  source 1..21: mol_type = other RNA
caaaattgaccagagagagct

SEQ ID NO: 7149 - RNA, 21 nt, synthetic construct
  source 1..21: mol_type = other RNA
caaagaatcataatggaaaga

SEQ ID NO: 7150 - RNA, 21 nt, synthetic construct
  source 1..21: mol_type = other RNA
caaagtacagcccagtttcat

SEQ ID NO: 7151 - RNA, 21 nt, synthetic construct
  source 1..21: mol_type = other RNA
caaagtatacttccggggtca

SEQ ID NO: 7152 - RNA, 21 nt, synthetic construct
  source 1..21: mol_type = other RNA
caaagtgcttctcttagagct

SEQ ID NO: 7153 - RNA, 21 nt, synthetic construct
  source 1..21: mol_type = other RNA
caaatgcaacccatattttcc

SEQ ID NO: 7154 - RNA, 21 nt, synthetic construct
  source 1..21: mol_type = other RNA
caaatgcatgtaagaagaccc

SEQ ID NO: 7155 - RNA, 21 nt, synthetic construct
  source 1..21: mol_type = other RNA
caaatggaggaatatgacgga

SEQ ID NO: 7156 - RNA, 21 nt, synthetic construct
  source 1..21: mol_type = other RNA
caacaacctgcccctgagcca

SEQ ID NO: 7157 - RNA, 21 nt, synthetic construct
  source 1..21: mol_type = other RNA
caacattctcggtgcctgtaa

SEQ ID NO: 7158 - RNA, 21 nt, synthetic construct
  source 1..21: mol_type = other RNA
caaccatgtatctgaaagaca

SEQ ID NO: 7159 - RNA, 21 nt, synthetic construct
  source 1..21: mol_type = other RNA
caacccatattttcctaatat

SEQ ID NO: 7160 - RNA, 21 nt, synthetic construct
  source 1..21: mol_type = other RNA
caacctgcccctgagccacaa

SEQ ID NO: 7161 - RNA, 21 nt, synthetic construct
  source 1..21: mol_type = other RNA
caacgtatctgagctctctct

SEQ ID NO: 7162 - RNA, 21 nt, synthetic construct
  source 1..21: mol_type = other RNA
caactcaaggtccatgcctct

SEQ ID NO: 7163 - RNA, 21 nt, synthetic construct
  source 1..21: mol_type = other RNA
caactcacctaatgtttatga

SEQ ID NO: 7164 - RNA, 21 nt, synthetic construct
  source 1..21: mol_type = other RNA
caactctaatagtgcttaaaa

SEQ ID NO: 7165 - RNA, 21 nt, synthetic construct
  source 1..21: mol_type = other RNA
caagagagatgttttggggac

SEQ ID NO: 7166 - RNA, 21 nt, synthetic construct
  source 1..21: mol_type = other RNA
caagattgaccccggaagtat

SEQ ID NO: 7167 - RNA, 21 nt, synthetic construct
  source 1..21: mol_type = other RNA
caagattttgaatgcttcctg

SEQ ID NO: 7168 - RNA, 21 nt, synthetic construct
  source 1..21: mol_type = other RNA
caagcctctagtcttcctttt

SEQ ID NO: 7169 - RNA, 21 nt, synthetic construct
  source 1..21: mol_type = other RNA
caaggccacccttcttatact

SEQ ID NO: 7170 - RNA, 21 nt, synthetic construct
  source 1..21: mol_type = other RNA
caaggcccaccttgagaggtg

SEQ ID NO: 7171 - RNA, 21 nt, synthetic construct
  source 1..21: mol_type = other RNA
caagggggactgtctttcaga

SEQ ID NO: 7172 - RNA, 21 nt, synthetic construct
  source 1..21: mol_type = other RNA
caaggtccacttggttcatgt

SEQ ID NO: 7173 - RNA, 21 nt, synthetic construct
  source 1..21: mol_type = other RNA
caaggtccatgcctctggaat

SEQ ID NO: 7174 - RNA, 21 nt, synthetic construct
  source 1..21: mol_type = other RNA
caaggtctacatgaggaactc

SEQ ID NO: 7175 - RNA, 21 nt, synthetic construct
  source 1..21: mol_type = other RNA
caaggtgggccttgctacctc

SEQ ID NO: 7176 - RNA, 21 nt, synthetic construct
  source 1..21: mol_type = other RNA
caagtaagaagacatgaacca

SEQ ID NO: 7177 - RNA, 21 nt, synthetic construct
  source 1..21: mol_type = other RNA
caagtccaactcaaggtccat

SEQ ID NO: 7178 - RNA, 21 nt, synthetic construct
  source 1..21: mol_type = other RNA
caagtggaccttgagaccaca

SEQ ID NO: 7179 - RNA, 21 nt, synthetic construct
  source 1..21: mol_type = other RNA
caatatctacattctctcttt

SEQ ID NO: 7180 - RNA, 21 nt, synthetic construct
  source 1..21: mol_type = other RNA
caatcaactctaatagtgctt

SEQ ID NO: 7181 - RNA, 21 nt, synthetic construct
  source 1..21: mol_type = other RNA
caatcaatgatttttaagcac

SEQ ID NO: 7182 - RNA, 21 nt, synthetic construct
  source 1..21: mol_type = other RNA
caatctgcctaaatactctca

SEQ ID NO: 7183 - RNA, 21 nt, synthetic construct
  source 1..21: mol_type = other RNA
caatcttaccagtgctgatca

SEQ ID NO: 7184 - RNA, 21 nt, synthetic construct
  source 1..21: mol_type = other RNA
caatcttgcaacaacctgccc

SEQ ID NO: 7185 - RNA, 21 nt, synthetic construct
  source 1..21: mol_type = other RNA
caatgaaactgggctgtactt

SEQ ID NO: 7186 - RNA, 21 nt, synthetic construct
  source 1..21: mol_type = other RNA
caatgccccactggcagcatc

SEQ ID NO: 7187 - RNA, 21 nt, synthetic construct
  source 1..21: mol_type = other RNA
caattccataggtgtcttccc

SEQ ID NO: 7188 - RNA, 21 nt, synthetic construct
  source 1..21: mol_type = other RNA
caattgcactggaaatacaca

SEQ ID NO: 7189 - RNA, 21 nt, synthetic construct
  source 1..21: mol_type = other RNA
caattgtaggggtgtgtgtgt

SEQ ID NO: 7190 - RNA, 21 nt, synthetic construct
  source 1..21: mol_type = other RNA
caattttgaggaatctcagac

SEQ ID NO: 7191 - RNA, 21 nt, synthetic construct
  source 1..21: mol_type = other RNA
cacaaaaatgcacatctacat

SEQ ID NO: 7192 - RNA, 21 nt, synthetic construct
  source 1..21: mol_type = other RNA
cacaaccatgtatctgaaaga

SEQ ID NO: 7193 - RNA, 21 nt, synthetic construct
  source 1..21: mol_type = other RNA
cacaaggccacccttcttata

SEQ ID NO: 7194 - RNA, 21 nt, synthetic construct
  source 1..21: mol_type = other RNA
cacaaggtctacatgaggaac

SEQ ID NO: 7195 - RNA, 21 nt, synthetic construct
  source 1..21: mol_type = other RNA
cacaatatctacattctctct

SEQ ID NO: 7196 - RNA, 21 nt, synthetic construct
  source 1..21: mol_type = other RNA
cacacacacacccctacaatt

SEQ ID NO: 7197 - RNA, 21 nt, synthetic construct
  source 1..21: mol_type = other RNA
cacacacacccctacaattgc

SEQ ID NO: 7198 - RNA, 21 nt, synthetic construct
  source 1..21: mol_type = other RNA
cacacacccctacaattgcac

SEQ ID NO: 7199 - RNA, 21 nt, synthetic construct
  source 1..21: mol_type = other RNA
cacacccctacaattgcactg

SEQ ID NO: 7200 - RNA, 21 nt, synthetic construct
  source 1..21: mol_type = other RNA
cacagcatgtgtatttccagt

SEQ ID NO: 7201 - RNA, 21 nt, synthetic construct
  source 1..21: mol_type = other RNA
cacagggttcaaaatgtctgt

SEQ ID NO: 7202 - RNA, 21 nt, synthetic construct
  source 1..21: mol_type = other RNA
cacatctgcccagtagtgcag

SEQ ID NO: 7203 - RNA, 21 nt, synthetic construct
  source 1..21: mol_type = other RNA
cacatgctgtgttaggaatga

SEQ ID NO: 7204 - RNA, 21 nt, synthetic construct
  source 1..21: mol_type = other RNA
cacatggcagcccagagttct

SEQ ID NO: 7205 - RNA, 21 nt, synthetic construct
  source 1..21: mol_type = other RNA
caccagatcctggggatactt

SEQ ID NO: 7206 - RNA, 21 nt, synthetic construct
  source 1..21: mol_type = other RNA
cacccctacaattgcactgga

SEQ ID NO: 7207 - RNA, 21 nt, synthetic construct
  source 1..21: mol_type = other RNA
cacccttcttatacttcactc

SEQ ID NO: 7208 - RNA, 21 nt, synthetic construct
  source 1..21: mol_type = other RNA
caccgagaatgttgtattcag

SEQ ID NO: 7209 - RNA, 21 nt, synthetic construct
  source 1..21: mol_type = other RNA
caccgatggctcaggatatgc

SEQ ID NO: 7210 - RNA, 21 nt, synthetic construct
  source 1..21: mol_type = other RNA
cacctaatgtttatgagccag

SEQ ID NO: 7211 - RNA, 21 nt, synthetic construct
  source 1..21: mol_type = other RNA
cacctatggaattgtcctgct

SEQ ID NO: 7212 - RNA, 21 nt, synthetic construct
  source 1..21: mol_type = other RNA
cacctctcaaggtgggccttg

SEQ ID NO: 7213 - RNA, 21 nt, synthetic construct
  source 1..21: mol_type = other RNA
cacctggtagctgctttttca

SEQ ID NO: 7214 - RNA, 21 nt, synthetic construct
  source 1..21: mol_type = other RNA
caccttgagaggtgagttaaa

SEQ ID NO: 7215 - RNA, 21 nt, synthetic construct
  source 1..21: mol_type = other RNA
caccttttaactcacctctca

SEQ ID NO: 7216 - RNA, 21 nt, synthetic construct
  source 1..21: mol_type = other RNA
cactaagatgagtgtagaaca

SEQ ID NO: 7217 - RNA, 21 nt, synthetic construct
  source 1..21: mol_type = other RNA
cactactgggcagatgtgggc

SEQ ID NO: 7218 - RNA, 21 nt, synthetic construct
  source 1..21: mol_type = other RNA
cactattagagttgattgtca

SEQ ID NO: 7219 - RNA, 21 nt, synthetic construct
  source 1..21: mol_type = other RNA
cactcatcttagtgcctgaga

SEQ ID NO: 7220 - RNA, 21 nt, synthetic construct
  source 1..21: mol_type = other RNA
cactccagaaagcaggacaat

SEQ ID NO: 7221 - RNA, 21 nt, synthetic construct
  source 1..21: mol_type = other RNA
cactgaatacaacattctcgg

SEQ ID NO: 7222 - RNA, 21 nt, synthetic construct
  source 1..21: mol_type = other RNA
cactgcccccaggtagctgct

SEQ ID NO: 7223 - RNA, 21 nt, synthetic construct
  source 1..21: mol_type = other RNA
cactggaaatacacatgctgt

SEQ ID NO: 7224 - RNA, 21 nt, synthetic construct
  source 1..21: mol_type = other RNA
cactggcagcatcttcacttc

SEQ ID NO: 7225 - RNA, 21 nt, synthetic construct
  source 1..21: mol_type = other RNA
cactggtaagattgaacactg

SEQ ID NO: 7226 - RNA, 21 nt, synthetic construct
  source 1..21: mol_type = other RNA
cacttctaaatgcatatcctg

SEQ ID NO: 7227 - RNA, 21 nt, synthetic construct
  source 1..21: mol_type = other RNA
cacttggttcatgtcttctta

SEQ ID NO: 7228 - RNA, 21 nt, synthetic construct
  source 1..21: mol_type = other RNA
cactttgggattctttccatt

SEQ ID NO: 7229 - RNA, 21 nt, synthetic construct
  source 1..21: mol_type = other RNA
cagaaagcaggacaattccat

SEQ ID NO: 7230 - RNA, 21 nt, synthetic construct
  source 1..21: mol_type = other RNA
cagacaaatggaggaatatga

SEQ ID NO: 7231 - RNA, 21 nt, synthetic construct
  source 1..21: mol_type = other RNA
cagacattttgaaccctgtgg

SEQ ID NO: 7232 - RNA, 21 nt, synthetic construct
  source 1..21: mol_type = other RNA
cagacgtttttcggcttatat

SEQ ID NO: 7233 - RNA, 21 nt, synthetic construct
  source 1..21: mol_type = other RNA
cagagagagctcagatacgtt

SEQ ID NO: 7234 - RNA, 21 nt, synthetic construct
  source 1..21: mol_type = other RNA
cagaggcatggaccttgagtt

SEQ ID NO: 7235 - RNA, 21 nt, synthetic construct
  source 1..21: mol_type = other RNA
cagagttctatgttcttccgt

SEQ ID NO: 7236 - RNA, 21 nt, synthetic construct
  source 1..21: mol_type = other RNA
cagataagcaagagagatgtt

SEQ ID NO: 7237 - RNA, 21 nt, synthetic construct
  source 1..21: mol_type = other RNA
cagatacatggttgtgacctg

SEQ ID NO: 7238 - RNA, 21 nt, synthetic construct
  source 1..21: mol_type = other RNA
cagatacgttgacatataaat

SEQ ID NO: 7239 - RNA, 21 nt, synthetic construct
  source 1..21: mol_type = other RNA
cagatcctggggatacttaga

SEQ ID NO: 7240 - RNA, 21 nt, synthetic construct
  source 1..21: mol_type = other RNA
cagatgtgggcccgcagcagc

SEQ ID NO: 7241 - RNA, 21 nt, synthetic construct
  source 1..21: mol_type = other RNA
cagattgaaaaggacaccttt

SEQ ID NO: 7242 - RNA, 21 nt, synthetic construct
  source 1..21: mol_type = other RNA
cagcactggtaagattgaaca

SEQ ID NO: 7243 - RNA, 21 nt, synthetic construct
  source 1..21: mol_type = other RNA
cagcagctacctgggggcagt

SEQ ID NO: 7244 - RNA, 21 nt, synthetic construct
  source 1..21: mol_type = other RNA
cagcatcttcacttctaaatg

SEQ ID NO: 7245 - RNA, 21 nt, synthetic construct
  source 1..21: mol_type = other RNA
cagcatgtgtatttccagtgc

SEQ ID NO: 7246 - RNA, 21 nt, synthetic construct
  source 1..21: mol_type = other RNA
cagcccagagttctatgttct

SEQ ID NO: 7247 - RNA, 21 nt, synthetic construct
  source 1..21: mol_type = other RNA
cagcccagtttcattgatcac

SEQ ID NO: 7248 - RNA, 21 nt, synthetic construct
  source 1..21: mol_type = other RNA
cagcctctttagcttattatg

SEQ ID NO: 7249 - RNA, 21 nt, synthetic construct
  source 1..21: mol_type = other RNA
cagctaccaggtgttctacac

SEQ ID NO: 7250 - RNA, 21 nt, synthetic construct
  source 1..21: mol_type = other RNA
cagctacctgggggcagtgtt

SEQ ID NO: 7251 - RNA, 21 nt, synthetic construct
  source 1..21: mol_type = other RNA
cagctactaatgatgttttcc

SEQ ID NO: 7252 - RNA, 21 nt, synthetic construct
  source 1..21: mol_type = other RNA
caggaagcattcaaaatcttg

SEQ ID NO: 7253 - RNA, 21 nt, synthetic construct
  source 1..21: mol_type = other RNA
caggacaattccataggtgtc

SEQ ID NO: 7254 - RNA, 21 nt, synthetic construct
  source 1..21: mol_type = other RNA
caggatatgcatttagaagtg

SEQ ID NO: 7255 - RNA, 21 nt, synthetic construct
  source 1..21: mol_type = other RNA
caggatctggtgatgatggag

SEQ ID NO: 7256 - RNA, 21 nt, synthetic construct
  source 1..21: mol_type = other RNA
caggcaagtccaactcaaggt

SEQ ID NO: 7257 - RNA, 21 nt, synthetic construct
  source 1..21: mol_type = other RNA
caggcaccgagaatgttgtat

SEQ ID NO: 7258 - RNA, 21 nt, synthetic construct
  source 1..21: mol_type = other RNA
caggcactaagatgagtgtag

SEQ ID NO: 7259 - RNA, 21 nt, synthetic construct
  source 1..21: mol_type = other RNA
caggggcaggttgttgcaaga

SEQ ID NO: 7260 - RNA, 21 nt, synthetic construct
  source 1..21: mol_type = other RNA
cagggttcaaaatgtctgtag

SEQ ID NO: 7261 - RNA, 21 nt, synthetic construct
  source 1..21: mol_type = other RNA
caggtagctgctgcgggccca

SEQ ID NO: 7262 - RNA, 21 nt, synthetic construct
  source 1..21: mol_type = other RNA
caggtcacaaccatgtatctg

SEQ ID NO: 7263 - RNA, 21 nt, synthetic construct
  source 1..21: mol_type = other RNA
caggtgttctacactcatctt

SEQ ID NO: 7264 - RNA, 21 nt, synthetic construct
  source 1..21: mol_type = other RNA
caggttgttgcaagattgacc

SEQ ID NO: 7265 - RNA, 21 nt, synthetic construct
  source 1..21: mol_type = other RNA
cagtagctcatcatcttcccc

SEQ ID NO: 7266 - RNA, 21 nt, synthetic construct
  source 1..21: mol_type = other RNA
cagtagtgcagtagctcatca

SEQ ID NO: 7267 - RNA, 21 nt, synthetic construct
  source 1..21: mol_type = other RNA
cagtcccccttgaggtagcaa

SEQ ID NO: 7268 - RNA, 21 nt, synthetic construct
  source 1..21: mol_type = other RNA
cagtgagggtcttcttacatg

SEQ ID NO: 7269 - RNA, 21 nt, synthetic construct
  source 1..21: mol_type = other RNA
cagtgcaattgtaggggtgtg

SEQ ID NO: 7270 - RNA, 21 nt, synthetic construct
  source 1..21: mol_type = other RNA
cagtgctgatcatttatatgt

SEQ ID NO: 7271 - RNA, 21 nt, synthetic construct
  source 1..21: mol_type = other RNA
cagtggggcattggcctcttt

SEQ ID NO: 7272 - RNA, 21 nt, synthetic construct
  source 1..21: mol_type = other RNA
cagtgttcaatcttaccagtg

SEQ ID NO: 7273 - RNA, 21 nt, synthetic construct
  source 1..21: mol_type = other RNA
cagtttcattgatcacaaggc

SEQ ID NO: 7274 - RNA, 21 nt, synthetic construct
  source 1..21: mol_type = other RNA
cataaacattaggtgagttga

SEQ ID NO: 7275 - RNA, 21 nt, synthetic construct
  source 1..21: mol_type = other RNA
cataataagctaaagaggctg

SEQ ID NO: 7276 - RNA, 21 nt, synthetic construct
  source 1..21: mol_type = other RNA
cataatggaaagaatcccaaa

SEQ ID NO: 7277 - RNA, 21 nt, synthetic construct
  source 1..21: mol_type = other RNA
catagaactctgggctgccat

SEQ ID NO: 7278 - RNA, 21 nt, synthetic construct
  source 1..21: mol_type = other RNA
cataggtgtcttcccattcca

SEQ ID NO: 7279 - RNA, 21 nt, synthetic construct
  source 1..21: mol_type = other RNA
catataaatgatcagcactgg

SEQ ID NO: 7280 - RNA, 21 nt, synthetic construct
  source 1..21: mol_type = other RNA
catatcctgagccatcggtga

SEQ ID NO: 7281 - RNA, 21 nt, synthetic construct
  source 1..21: mol_type = other RNA
catattaggaaaatatgggtt

SEQ ID NO: 7282 - RNA, 21 nt, synthetic construct
  source 1..21: mol_type = other RNA
catattcctccatttgtctgg

SEQ ID NO: 7283 - RNA, 21 nt, synthetic construct
  source 1..21: mol_type = other RNA
catcaccagatcctggggata

SEQ ID NO: 7284 - RNA, 21 nt, synthetic construct
  source 1..21: mol_type = other RNA
catcatcaccagatcctgggg

SEQ ID NO: 7285 - RNA, 21 nt, synthetic construct
  source 1..21: mol_type = other RNA
catcatcttcccctccatcat

SEQ ID NO: 7286 - RNA, 21 nt, synthetic construct
  source 1..21: mol_type = other RNA
catcattagtagctgacaatc

SEQ ID NO: 7287 - RNA, 21 nt, synthetic construct
  source 1..21: mol_type = other RNA
catcccttaaatcctcaggtc

SEQ ID NO: 7288 - RNA, 21 nt, synthetic construct
  source 1..21: mol_type = other RNA
catcggtgaaactaacagata

SEQ ID NO: 7289 - RNA, 21 nt, synthetic construct
  source 1..21: mol_type = other RNA
catctctcttgcttatctgtt

SEQ ID NO: 7290 - RNA, 21 nt, synthetic construct
  source 1..21: mol_type = other RNA
catctgcccagtagtgcagta

SEQ ID NO: 7291 - RNA, 21 nt, synthetic construct
  source 1..21: mol_type = other RNA
catcttagtgcctgagagtat

SEQ ID NO: 7292 - RNA, 21 nt, synthetic construct
  source 1..21: mol_type = other RNA
catcttcacttctaaatgcat

SEQ ID NO: 7293 - RNA, 21 nt, synthetic construct
  source 1..21: mol_type = other RNA
catcttcccctccatcatcac

SEQ ID NO: 7294 - RNA, 21 nt, synthetic construct
  source 1..21: mol_type = other RNA
catgaaaaagcagctaccagg

SEQ ID NO: 7295 - RNA, 21 nt, synthetic construct
  source 1..21: mol_type = other RNA
catgaaccaagtggaccttga

SEQ ID NO: 7296 - RNA, 21 nt, synthetic construct
  source 1..21: mol_type = other RNA
catgactattccttgttgaaa

SEQ ID NO: 7297 - RNA, 21 nt, synthetic construct
  source 1..21: mol_type = other RNA
catgaggaactctaagtatcc

SEQ ID NO: 7298 - RNA, 21 nt, synthetic construct
  source 1..21: mol_type = other RNA
catgcatttgaggtcaagtaa

SEQ ID NO: 7299 - RNA, 21 nt, synthetic construct
  source 1..21: mol_type = other RNA
catgcctctggaatgggaaga

SEQ ID NO: 7300 - RNA, 21 nt, synthetic construct
  source 1..21: mol_type = other RNA
catgctgtgttaggaatgaaa

SEQ ID NO: 7301 - RNA, 21 nt, synthetic construct
  source 1..21: mol_type = other RNA
catgcttctccctcttcacat

SEQ ID NO: 7302 - RNA, 21 nt, synthetic construct
  source 1..21: mol_type = other RNA
catggaccttgagttggactt

SEQ ID NO: 7303 - RNA, 21 nt, synthetic construct
  source 1..21: mol_type = other RNA
catggcagcccagagttctat

SEQ ID NO: 7304 - RNA, 21 nt, synthetic construct
  source 1..21: mol_type = other RNA
catggttgtgacctgaggatt

SEQ ID NO: 7305 - RNA, 21 nt, synthetic construct
  source 1..21: mol_type = other RNA
catgtaagaagaccctcactg

SEQ ID NO: 7306 - RNA, 21 nt, synthetic construct
  source 1..21: mol_type = other RNA
catgtagaccttgtggctcag

SEQ ID NO: 7307 - RNA, 21 nt, synthetic construct
  source 1..21: mol_type = other RNA
catgtatctgaaagacagtcc

SEQ ID NO: 7308 - RNA, 21 nt, synthetic construct
  source 1..21: mol_type = other RNA
catgtcttcttacttgacctc

SEQ ID NO: 7309 - RNA, 21 nt, synthetic construct
  source 1..21: mol_type = other RNA
catgtgaagagggagaagcat

SEQ ID NO: 7310 - RNA, 21 nt, synthetic construct
  source 1..21: mol_type = other RNA
catgtgtatttccagtgcaat

SEQ ID NO: 7311 - RNA, 21 nt, synthetic construct
  source 1..21: mol_type = other RNA
cattaggtgagttgaggagct

SEQ ID NO: 7312 - RNA, 21 nt, synthetic construct
  source 1..21: mol_type = other RNA
cattagtagctgacaatcaat

SEQ ID NO: 7313 - RNA, 21 nt, synthetic construct
  source 1..21: mol_type = other RNA
cattatgattctttgttacag

SEQ ID NO: 7314 - RNA, 21 nt, synthetic construct
  source 1..21: mol_type = other RNA
cattcaaaatcttgaccaaat

SEQ ID NO: 7315 - RNA, 21 nt, synthetic construct
  source 1..21: mol_type = other RNA
cattccagaggcatggacctt

SEQ ID NO: 7316 - RNA, 21 nt, synthetic construct
  source 1..21: mol_type = other RNA
cattcctaacacagcatgtgt

SEQ ID NO: 7317 - RNA, 21 nt, synthetic construct
  source 1..21: mol_type = other RNA
cattctcggtgcctgtaacaa

SEQ ID NO: 7318 - RNA, 21 nt, synthetic construct
  source 1..21: mol_type = other RNA
cattctctctttagtcataca

SEQ ID NO: 7319 - RNA, 21 nt, synthetic construct
  source 1..21: mol_type = other RNA
cattgatcacaaggccaccct

SEQ ID NO: 7320 - RNA, 21 nt, synthetic construct
  source 1..21: mol_type = other RNA
cattgattgtcagctactaat

SEQ ID NO: 7321 - RNA, 21 nt, synthetic construct
  source 1..21: mol_type = other RNA
cattggcctctttcagcctct

SEQ ID NO: 7322 - RNA, 21 nt, synthetic construct
  source 1..21: mol_type = other RNA
catttagaagtgaagatgctg

SEQ ID NO: 7323 - RNA, 21 nt, synthetic construct
  source 1..21: mol_type = other RNA
catttatatgtcaacgtatct

SEQ ID NO: 7324 - RNA, 21 nt, synthetic construct
  source 1..21: mol_type = other RNA
catttcacaaaaatgcacatc

SEQ ID NO: 7325 - RNA, 21 nt, synthetic construct
  source 1..21: mol_type = other RNA
catttcattcctaacacagca

SEQ ID NO: 7326 - RNA, 21 nt, synthetic construct
  source 1..21: mol_type = other RNA
catttgaggtcaagtaagaag

SEQ ID NO: 7327 - RNA, 21 nt, synthetic construct
  source 1..21: mol_type = other RNA
catttggtcaagattttgaat

SEQ ID NO: 7328 - RNA, 21 nt, synthetic construct
  source 1..21: mol_type = other RNA
catttgtctggctcataaaca

SEQ ID NO: 7329 - RNA, 21 nt, synthetic construct
  source 1..21: mol_type = other RNA
cattttgaaccctgtggtctc

SEQ ID NO: 7330 - RNA, 21 nt, synthetic construct
  source 1..21: mol_type = other RNA
ccaaaacatctctcttgctta

SEQ ID NO: 7331 - RNA, 21 nt, synthetic construct
  source 1..21: mol_type = other RNA
ccaaaaggagctttcaacaag

SEQ ID NO: 7332 - RNA, 21 nt, synthetic construct
  source 1..21: mol_type = other RNA
ccaaagtatacttccggggtc

SEQ ID NO: 7333 - RNA, 21 nt, synthetic construct
  source 1..21: mol_type = other RNA
ccaaagtgcttctcttagagc

SEQ ID NO: 7334 - RNA, 21 nt, synthetic construct
  source 1..21: mol_type = other RNA
ccaaatgcaacccatattttc

SEQ ID NO: 7335 - RNA, 21 nt, synthetic construct
  source 1..21: mol_type = other RNA
ccaactcaaggtccatgcctc

SEQ ID NO: 7336 - RNA, 21 nt, synthetic construct
  source 1..21: mol_type = other RNA
ccaagtggaccttgagaccac

SEQ ID NO: 7337 - RNA, 21 nt, synthetic construct
  source 1..21: mol_type = other RNA
ccaatgccccactggcagcat

SEQ ID NO: 7338 - RNA, 21 nt, synthetic construct
  source 1..21: mol_type = other RNA
ccacaaggtctacatgaggaa

SEQ ID NO: 7339 - RNA, 21 nt, synthetic construct
  source 1..21: mol_type = other RNA
ccacagggttcaaaatgtctg

SEQ ID NO: 7340 - RNA, 21 nt, synthetic construct
  source 1..21: mol_type = other RNA
ccacatctgcccagtagtgca

SEQ ID NO: 7341 - RNA, 21 nt, synthetic construct
  source 1..21: mol_type = other RNA
ccacccttcttatacttcact

SEQ ID NO: 7342 - RNA, 21 nt, synthetic construct
  source 1..21: mol_type = other RNA
ccaccttgagaggtgagttaa

SEQ ID NO: 7343 - RNA, 21 nt, synthetic construct
  source 1..21: mol_type = other RNA
ccactggcagcatcttcactt

SEQ ID NO: 7344 - RNA, 21 nt, synthetic construct
  source 1..21: mol_type = other RNA
ccacttggttcatgtcttctt

SEQ ID NO: 7345 - RNA, 21 nt, synthetic construct
  source 1..21: mol_type = other RNA
ccagaaagcaggacaattcca

SEQ ID NO: 7346 - RNA, 21 nt, synthetic construct
  source 1..21: mol_type = other RNA
ccagacaaatggaggaatatg

SEQ ID NO: 7347 - RNA, 21 nt, synthetic construct
  source 1..21: mol_type = other RNA
ccagagagagctcagatacgt

SEQ ID NO: 7348 - RNA, 21 nt, synthetic construct
  source 1..21: mol_type = other RNA
ccagaggcatggaccttgagt

SEQ ID NO: 7349 - RNA, 21 nt, synthetic construct
  source 1..21: mol_type = other RNA
ccagagttctatgttcttccg

SEQ ID NO: 7350 - RNA, 21 nt, synthetic construct
  source 1..21: mol_type = other RNA
ccagatcctggggatacttag

SEQ ID NO: 7351 - RNA, 21 nt, synthetic construct
  source 1..21: mol_type = other RNA
ccaggatctggtgatgatgga

SEQ ID NO: 7352 - RNA, 21 nt, synthetic construct
  source 1..21: mol_type = other RNA
ccaggtagctgctgcgggccc

SEQ ID NO: 7353 - RNA, 21 nt, synthetic construct
  source 1..21: mol_type = other RNA
ccaggtgttctacactcatct

SEQ ID NO: 7354 - RNA, 21 nt, synthetic construct
  source 1..21: mol_type = other RNA
ccagtagtgcagtagctcatc

SEQ ID NO: 7355 - RNA, 21 nt, synthetic construct
  source 1..21: mol_type = other RNA
ccagtgcaattgtaggggtgt

SEQ ID NO: 7356 - RNA, 21 nt, synthetic construct
  source 1..21: mol_type = other RNA
ccagtgctgatcatttatatg

SEQ ID NO: 7357 - RNA, 21 nt, synthetic construct
  source 1..21: mol_type = other RNA
ccagtggggcattggcctctt

SEQ ID NO: 7358 - RNA, 21 nt, synthetic construct
  source 1..21: mol_type = other RNA
ccagtttcattgatcacaagg

SEQ ID NO: 7359 - RNA, 21 nt, synthetic construct
  source 1..21: mol_type = other RNA
ccataggtgtcttcccattcc

SEQ ID NO: 7360 - RNA, 21 nt, synthetic construct
  source 1..21: mol_type = other RNA
ccatattttcctaatatgtac

SEQ ID NO: 7361 - RNA, 21 nt, synthetic construct
  source 1..21: mol_type = other RNA
ccatcatcaccagatcctggg

SEQ ID NO: 7362 - RNA, 21 nt, synthetic construct
  source 1..21: mol_type = other RNA
ccatcccttaaatcctcaggt

SEQ ID NO: 7363 - RNA, 21 nt, synthetic construct
  source 1..21: mol_type = other RNA
ccatcggtgaaactaacagat

SEQ ID NO: 7364 - RNA, 21 nt, synthetic construct
  source 1..21: mol_type = other RNA
ccatgcctctggaatgggaag

SEQ ID NO: 7365 - RNA, 21 nt, synthetic construct
  source 1..21: mol_type = other RNA
ccatgtatctgaaagacagtc

SEQ ID NO: 7366 - RNA, 21 nt, synthetic construct
  source 1..21: mol_type = other RNA
ccatgtgaagagggagaagca

SEQ ID NO: 7367 - RNA, 21 nt, synthetic construct
  source 1..21: mol_type = other RNA
ccattatgattctttgttaca

SEQ ID NO: 7368 - RNA, 21 nt, synthetic construct
  source 1..21: mol_type = other RNA
ccattccagaggcatggacct

SEQ ID NO: 7369 - RNA, 21 nt, synthetic construct
  source 1..21: mol_type = other RNA
ccatttgtctggctcataaac

SEQ ID NO: 7370 - RNA, 21 nt, synthetic construct
  source 1..21: mol_type = other RNA
cccaaaacatctctcttgctt

SEQ ID NO: 7371 - RNA, 21 nt, synthetic construct
  source 1..21: mol_type = other RNA
cccaaagtgcttctcttagag

SEQ ID NO: 7372 - RNA, 21 nt, synthetic construct
  source 1..21: mol_type = other RNA
cccacatctgcccagtagtgc

SEQ ID NO: 7373 - RNA, 21 nt, synthetic construct
  source 1..21: mol_type = other RNA
cccaccttgagaggtgagtta

SEQ ID NO: 7374 - RNA, 21 nt, synthetic construct
  source 1..21: mol_type = other RNA
cccactggcagcatcttcact

SEQ ID NO: 7375 - RNA, 21 nt, synthetic construct
  source 1..21: mol_type = other RNA
cccagagttctatgttcttcc

SEQ ID NO: 7376 - RNA, 21 nt, synthetic construct
  source 1..21: mol_type = other RNA
cccaggatctggtgatgatgg

SEQ ID NO: 7377 - RNA, 21 nt, synthetic construct
  source 1..21: mol_type = other RNA
cccaggtagctgctgcgggcc

SEQ ID NO: 7378 - RNA, 21 nt, synthetic construct
  source 1..21: mol_type = other RNA
cccagtagtgcagtagctcat

SEQ ID NO: 7379 - RNA, 21 nt, synthetic construct
  source 1..21: mol_type = other RNA
cccagtttcattgatcacaag

SEQ ID NO: 7380 - RNA, 21 nt, synthetic construct
  source 1..21: mol_type = other RNA
cccatattttcctaatatgta

SEQ ID NO: 7381 - RNA, 21 nt, synthetic construct
  source 1..21: mol_type = other RNA
cccattccagaggcatggacc

SEQ ID NO: 7382 - RNA, 21 nt, synthetic construct
  source 1..21: mol_type = other RNA
ccccaaaacatctctcttgct

SEQ ID NO: 7383 - RNA, 21 nt, synthetic construct
  source 1..21: mol_type = other RNA
ccccactggcagcatcttcac

SEQ ID NO: 7384 - RNA, 21 nt, synthetic construct
  source 1..21: mol_type = other RNA
ccccaggatctggtgatgatg

SEQ ID NO: 7385 - RNA, 21 nt, synthetic construct
  source 1..21: mol_type = other RNA
ccccaggtagctgctgcgggc

SEQ ID NO: 7386 - RNA, 21 nt, synthetic construct
  source 1..21: mol_type = other RNA
cccccaggtagctgctgcggg

SEQ ID NO: 7387 - RNA, 21 nt, synthetic construct
  source 1..21: mol_type = other RNA
cccccttgaggtagcaaggcc

SEQ ID NO: 7388 - RNA, 21 nt, synthetic construct
  source 1..21: mol_type = other RNA
ccccggaagtatactttggaa

SEQ ID NO: 7389 - RNA, 21 nt, synthetic construct
  source 1..21: mol_type = other RNA
cccctacaattgcactggaaa

SEQ ID NO: 7390 - RNA, 21 nt, synthetic construct
  source 1..21: mol_type = other RNA
cccctccatcatcaccagatc

SEQ ID NO: 7391 - RNA, 21 nt, synthetic construct
  source 1..21: mol_type = other RNA
cccctgagccacaaggtctac

SEQ ID NO: 7392 - RNA, 21 nt, synthetic construct
  source 1..21: mol_type = other RNA
ccccttgaggtagcaaggccc

SEQ ID NO: 7393 - RNA, 21 nt, synthetic construct
  source 1..21: mol_type = other RNA
cccgcagcagctacctggggg

SEQ ID NO: 7394 - RNA, 21 nt, synthetic construct
  source 1..21: mol_type = other RNA
cccggaagtatactttggaat

SEQ ID NO: 7395 - RNA, 21 nt, synthetic construct
  source 1..21: mol_type = other RNA
ccctacaattgcactggaaat

SEQ ID NO: 7396 - RNA, 21 nt, synthetic construct
  source 1..21: mol_type = other RNA
ccctcactgaatacaacattc

SEQ ID NO: 7397 - RNA, 21 nt, synthetic construct
  source 1..21: mol_type = other RNA
ccctccatcatcaccagatcc

SEQ ID NO: 7398 - RNA, 21 nt, synthetic construct
  source 1..21: mol_type = other RNA
ccctcttcacatggcagccca

SEQ ID NO: 7399 - RNA, 21 nt, synthetic construct
  source 1..21: mol_type = other RNA
ccctgagccacaaggtctaca

SEQ ID NO: 7400 - RNA, 21 nt, synthetic construct
  source 1..21: mol_type = other RNA
ccctgtggtctcaaggtccac

SEQ ID NO: 7401 - RNA, 21 nt, synthetic construct
  source 1..21: mol_type = other RNA
cccttaaatcctcaggtcaca

SEQ ID NO: 7402 - RNA, 21 nt, synthetic construct
  source 1..21: mol_type = other RNA
cccttcttatacttcactcca

SEQ ID NO: 7403 - RNA, 21 nt, synthetic construct
  source 1..21: mol_type = other RNA
cccttgaggtagcaaggccca

SEQ ID NO: 7404 - RNA, 21 nt, synthetic construct
  source 1..21: mol_type = other RNA
ccgaaaaacgtctgagattcc

SEQ ID NO: 7405 - RNA, 21 nt, synthetic construct
  source 1..21: mol_type = other RNA
ccgagaatgttgtattcagtg

SEQ ID NO: 7406 - RNA, 21 nt, synthetic construct
  source 1..21: mol_type = other RNA
ccgatggctcaggatatgcat

SEQ ID NO: 7407 - RNA, 21 nt, synthetic construct
  source 1..21: mol_type = other RNA
ccgcagcagctacctgggggc

SEQ ID NO: 7408 - RNA, 21 nt, synthetic construct
  source 1..21: mol_type = other RNA
ccggaagtatactttggaata

SEQ ID NO: 7409 - RNA, 21 nt, synthetic construct
  source 1..21: mol_type = other RNA
ccggggtcaatcttgcaacaa

SEQ ID NO: 7410 - RNA, 21 nt, synthetic construct
  source 1..21: mol_type = other RNA
ccgtcatattcctccatttgt

SEQ ID NO: 7411 - RNA, 21 nt, synthetic construct
  source 1..21: mol_type = other RNA
cctaaatactctcaggcacta

SEQ ID NO: 7412 - RNA, 21 nt, synthetic construct
  source 1..21: mol_type = other RNA
cctaacacagcatgtgtattt

SEQ ID NO: 7413 - RNA, 21 nt, synthetic construct
  source 1..21: mol_type = other RNA
cctaatatgtacttcacaata

SEQ ID NO: 7414 - RNA, 21 nt, synthetic construct
  source 1..21: mol_type = other RNA
cctaatgtttatgagccagac

SEQ ID NO: 7415 - RNA, 21 nt, synthetic construct
  source 1..21: mol_type = other RNA
cctacaattgcactggaaata

SEQ ID NO: 7416 - RNA, 21 nt, synthetic construct
  source 1..21: mol_type = other RNA
cctatggaattgtcctgcttt

SEQ ID NO: 7417 - RNA, 21 nt, synthetic construct
  source 1..21: mol_type = other RNA
cctcaaaattgaccagagaga

SEQ ID NO: 7418 - RNA, 21 nt, synthetic construct
  source 1..21: mol_type = other RNA
cctcaaatgcatgtaagaaga

SEQ ID NO: 7419 - RNA, 21 nt, synthetic construct
  source 1..21: mol_type = other RNA
cctcaactcacctaatgttta

SEQ ID NO: 7420 - RNA, 21 nt, synthetic construct
  source 1..21: mol_type = other RNA
cctcaagggggactgtctttc

SEQ ID NO: 7421 - RNA, 21 nt, synthetic construct
  source 1..21: mol_type = other RNA
cctcactgaatacaacattct

SEQ ID NO: 7422 - RNA, 21 nt, synthetic construct
  source 1..21: mol_type = other RNA
cctcaggtcacaaccatgtat

SEQ ID NO: 7423 - RNA, 21 nt, synthetic construct
  source 1..21: mol_type = other RNA
cctcatgtagaccttgtggct

SEQ ID NO: 7424 - RNA, 21 nt, synthetic construct
  source 1..21: mol_type = other RNA
cctccatcatcaccagatcct

SEQ ID NO: 7425 - RNA, 21 nt, synthetic construct
  source 1..21: mol_type = other RNA
cctccatttgtctggctcata

SEQ ID NO: 7426 - RNA, 21 nt, synthetic construct
  source 1..21: mol_type = other RNA
cctctagtcttccttttccat

SEQ ID NO: 7427 - RNA, 21 nt, synthetic construct
  source 1..21: mol_type = other RNA
cctctcaaggtgggccttgct

SEQ ID NO: 7428 - RNA, 21 nt, synthetic construct
  source 1..21: mol_type = other RNA
cctctggaatgggaagacacc

SEQ ID NO: 7429 - RNA, 21 nt, synthetic construct
  source 1..21: mol_type = other RNA
cctcttcacatggcagcccag

SEQ ID NO: 7430 - RNA, 21 nt, synthetic construct
  source 1..21: mol_type = other RNA
cctctttagcttattatgcaa

SEQ ID NO: 7431 - RNA, 21 nt, synthetic construct
  source 1..21: mol_type = other RNA
cctctttcagcctctttagct

SEQ ID NO: 7432 - RNA, 21 nt, synthetic construct
  source 1..21: mol_type = other RNA
cctgaaataaatccaaaagga

SEQ ID NO: 7433 - RNA, 21 nt, synthetic construct
  source 1..21: mol_type = other RNA
cctgacaatcaactctaatag

SEQ ID NO: 7434 - RNA, 21 nt, synthetic construct
  source 1..21: mol_type = other RNA
cctgagagtatttaggcagat

SEQ ID NO: 7435 - RNA, 21 nt, synthetic construct
  source 1..21: mol_type = other RNA
cctgagccacaaggtctacat

SEQ ID NO: 7436 - RNA, 21 nt, synthetic construct
  source 1..21: mol_type = other RNA
cctgagccatcggtgaaacta

SEQ ID NO: 7437 - RNA, 21 nt, synthetic construct
  source 1..21: mol_type = other RNA
cctgaggatttaagggatgga

SEQ ID NO: 7438 - RNA, 21 nt, synthetic construct
  source 1..21: mol_type = other RNA
cctgcccctgagccacaaggt

SEQ ID NO: 7439 - RNA, 21 nt, synthetic construct
  source 1..21: mol_type = other RNA
cctgctttctggagtgaagta

SEQ ID NO: 7440 - RNA, 21 nt, synthetic construct
  source 1..21: mol_type = other RNA
cctggggatacttagagttcc

SEQ ID NO: 7441 - RNA, 21 nt, synthetic construct
  source 1..21: mol_type = other RNA
cctgggggcagtgttcaatct

SEQ ID NO: 7442 - RNA, 21 nt, synthetic construct
  source 1..21: mol_type = other RNA
cctggtagctgctttttcatg

SEQ ID NO: 7443 - RNA, 21 nt, synthetic construct
  source 1..21: mol_type = other RNA
cctgtaacaaagaatcataat

SEQ ID NO: 7444 - RNA, 21 nt, synthetic construct
  source 1..21: mol_type = other RNA
cctgtggtctcaaggtccact

SEQ ID NO: 7445 - RNA, 21 nt, synthetic construct
  source 1..21: mol_type = other RNA
ccttaaatcctcaggtcacaa

SEQ ID NO: 7446 - RNA, 21 nt, synthetic construct
  source 1..21: mol_type = other RNA
ccttcttatacttcactccag

SEQ ID NO: 7447 - RNA, 21 nt, synthetic construct
  source 1..21: mol_type = other RNA
ccttgagaccacagggttcaa

SEQ ID NO: 7448 - RNA, 21 nt, synthetic construct
  source 1..21: mol_type = other RNA
ccttgagaggtgagttaaaag

SEQ ID NO: 7449 - RNA, 21 nt, synthetic construct
  source 1..21: mol_type = other RNA
ccttgaggtagcaaggcccac

SEQ ID NO: 7450 - RNA, 21 nt, synthetic construct
  source 1..21: mol_type = other RNA
ccttgagttggacttgcctga

SEQ ID NO: 7451 - RNA, 21 nt, synthetic construct
  source 1..21: mol_type = other RNA
ccttgctacctcaagggggac

SEQ ID NO: 7452 - RNA, 21 nt, synthetic construct
  source 1..21: mol_type = other RNA
ccttgtgatcaatgaaactgg

SEQ ID NO: 7453 - RNA, 21 nt, synthetic construct
  source 1..21: mol_type = other RNA
ccttgtggctcaggggcaggt

SEQ ID NO: 7454 - RNA, 21 nt, synthetic construct
  source 1..21: mol_type = other RNA
ccttgttgaaagctccttttg

SEQ ID NO: 7455 - RNA, 21 nt, synthetic construct
  source 1..21: mol_type = other RNA
ccttttaactcacctctcaag

SEQ ID NO: 7456 - RNA, 21 nt, synthetic construct
  source 1..21: mol_type = other RNA
ccttttcaatctgcctaaata

SEQ ID NO: 7457 - RNA, 21 nt, synthetic construct
  source 1..21: mol_type = other RNA
ccttttccatcccttaaatcc

SEQ ID NO: 7458 - RNA, 21 nt, synthetic construct
  source 1..21: mol_type = other RNA
ccttttggatttatttcaggc

SEQ ID NO: 7459 - RNA, 21 nt, synthetic construct
  source 1..21: mol_type = other RNA
cgaaaaacgtctgagattcct

SEQ ID NO: 7460 - RNA, 21 nt, synthetic construct
  source 1..21: mol_type = other RNA
cgagaatgttgtattcagtga

SEQ ID NO: 7461 - RNA, 21 nt, synthetic construct
  source 1..21: mol_type = other RNA
cgatggctcaggatatgcatt

SEQ ID NO: 7462 - RNA, 21 nt, synthetic construct
  source 1..21: mol_type = other RNA
cgcagcagctacctgggggca

SEQ ID NO: 7463 - RNA, 21 nt, synthetic construct
  source 1..21: mol_type = other RNA
cggaagaacatagaactctgg

SEQ ID NO: 7464 - RNA, 21 nt, synthetic construct
  source 1..21: mol_type = other RNA
cggaagtatactttggaatat

SEQ ID NO: 7465 - RNA, 21 nt, synthetic construct
  source 1..21: mol_type = other RNA
cggcttatataagctctaaga

SEQ ID NO: 7466 - RNA, 21 nt, synthetic construct
  source 1..21: mol_type = other RNA
cgggcccacatctgcccagta

SEQ ID NO: 7467 - RNA, 21 nt, synthetic construct
  source 1..21: mol_type = other RNA
cggggtcaatcttgcaacaac

SEQ ID NO: 7468 - RNA, 21 nt, synthetic construct
  source 1..21: mol_type = other RNA
cggtgaaactaacagataagc

SEQ ID NO: 7469 - RNA, 21 nt, synthetic construct
  source 1..21: mol_type = other RNA
cggtgcctgtaacaaagaatc

SEQ ID NO: 7470 - RNA, 21 nt, synthetic construct
  source 1..21: mol_type = other RNA
cgtatctgagctctctctggt

SEQ ID NO: 7471 - RNA, 21 nt, synthetic construct
  source 1..21: mol_type = other RNA
cgtcatattcctccatttgtc

SEQ ID NO: 7472 - RNA, 21 nt, synthetic construct
  source 1..21: mol_type = other RNA
cgtctgagattcctcaaaatt

SEQ ID NO: 7473 - RNA, 21 nt, synthetic construct
  source 1..21: mol_type = other RNA
cgttgacatataaatgatcag

SEQ ID NO: 7474 - RNA, 21 nt, synthetic construct
  source 1..21: mol_type = other RNA
cgtttttcggcttatataagc

SEQ ID NO: 7475 - RNA, 21 nt, synthetic construct
  source 1..21: mol_type = other RNA
ctaaagagagaatgtagatat

SEQ ID NO: 7476 - RNA, 21 nt, synthetic construct
  source 1..21: mol_type = other RNA
ctaaagaggctgaaagaggcc

SEQ ID NO: 7477 - RNA, 21 nt, synthetic construct
  source 1..21: mol_type = other RNA
ctaaatactctcaggcactaa

SEQ ID NO: 7478 - RNA, 21 nt, synthetic construct
  source 1..21: mol_type = other RNA
ctaaatgcatatcctgagcca

SEQ ID NO: 7479 - RNA, 21 nt, synthetic construct
  source 1..21: mol_type = other RNA
ctaacacagcatgtgtatttc

SEQ ID NO: 7480 - RNA, 21 nt, synthetic construct
  source 1..21: mol_type = other RNA
ctaacagataagcaagagaga

SEQ ID NO: 7481 - RNA, 21 nt, synthetic construct
  source 1..21: mol_type = other RNA
ctaagagaagcactttgggat

SEQ ID NO: 7482 - RNA, 21 nt, synthetic construct
  source 1..21: mol_type = other RNA
ctaagatgagtgtagaacacc

SEQ ID NO: 7483 - RNA, 21 nt, synthetic construct
  source 1..21: mol_type = other RNA
ctaagtatccccaggatctgg

SEQ ID NO: 7484 - RNA, 21 nt, synthetic construct
  source 1..21: mol_type = other RNA
ctaatgtttatgagccagaca

SEQ ID NO: 7485 - RNA, 21 nt, synthetic construct
  source 1..21: mol_type = other RNA
ctacaattgcactggaaatac

SEQ ID NO: 7486 - RNA, 21 nt, synthetic construct
  source 1..21: mol_type = other RNA
ctacactcatcttagtgcctg

SEQ ID NO: 7487 - RNA, 21 nt, synthetic construct
  source 1..21: mol_type = other RNA
ctacagacattttgaaccctg

SEQ ID NO: 7488 - RNA, 21 nt, synthetic construct
  source 1..21: mol_type = other RNA
ctacatgaggaactctaagta

SEQ ID NO: 7489 - RNA, 21 nt, synthetic construct
  source 1..21: mol_type = other RNA
ctacattctctctttagtcat

SEQ ID NO: 7490 - RNA, 21 nt, synthetic construct
  source 1..21: mol_type = other RNA
ctaccaggtgttctacactca

SEQ ID NO: 7491 - RNA, 21 nt, synthetic construct
  source 1..21: mol_type = other RNA
ctacctcaagggggactgtct

SEQ ID NO: 7492 - RNA, 21 nt, synthetic construct
  source 1..21: mol_type = other RNA
ctacctgggggcagtgttcaa

SEQ ID NO: 7493 - RNA, 21 nt, synthetic construct
  source 1..21: mol_type = other RNA
ctactaatgatgttttcctat

SEQ ID NO: 7494 - RNA, 21 nt, synthetic construct
  source 1..21: mol_type = other RNA
ctactgcactactgggcagat

SEQ ID NO: 7495 - RNA, 21 nt, synthetic construct
  source 1..21: mol_type = other RNA
ctactgggcagatgtgggccc

SEQ ID NO: 7496 - RNA, 21 nt, synthetic construct
  source 1..21: mol_type = other RNA
ctagaggcttgcataataagc

SEQ ID NO: 7497 - RNA, 21 nt, synthetic construct
  source 1..21: mol_type = other RNA
ctagtcttccttttccatccc

SEQ ID NO: 7498 - RNA, 21 nt, synthetic construct
  source 1..21: mol_type = other RNA
ctatggaattgtcctgctttc

SEQ ID NO: 7499 - RNA, 21 nt, synthetic construct
  source 1..21: mol_type = other RNA
ctatgttcttccgtcatattc

SEQ ID NO: 7500 - RNA, 21 nt, synthetic construct
  source 1..21: mol_type = other RNA
ctattagagttgattgtcagg

SEQ ID NO: 7501 - RNA, 21 nt, synthetic construct
  source 1..21: mol_type = other RNA
ctattccttgttgaaagctcc

SEQ ID NO: 7502 - RNA, 21 nt, synthetic construct
  source 1..21: mol_type = other RNA
ctcaaaattgaccagagagag

SEQ ID NO: 7503 - RNA, 21 nt, synthetic construct
  source 1..21: mol_type = other RNA
ctcaaatgcatgtaagaagac

SEQ ID NO: 7504 - RNA, 21 nt, synthetic construct
  source 1..21: mol_type = other RNA
ctcaactcacctaatgtttat

SEQ ID NO: 7505 - RNA, 21 nt, synthetic construct
  source 1..21: mol_type = other RNA
ctcaagggggactgtctttca

SEQ ID NO: 7506 - RNA, 21 nt, synthetic construct
  source 1..21: mol_type = other RNA
ctcaaggtccacttggttcat

SEQ ID NO: 7507 - RNA, 21 nt, synthetic construct
  source 1..21: mol_type = other RNA
ctcaaggtccatgcctctgga

SEQ ID NO: 7508 - RNA, 21 nt, synthetic construct
  source 1..21: mol_type = other RNA
ctcaaggtgggccttgctacc

SEQ ID NO: 7509 - RNA, 21 nt, synthetic construct
  source 1..21: mol_type = other RNA
ctcacctaatgtttatgagcc

SEQ ID NO: 7510 - RNA, 21 nt, synthetic construct
  source 1..21: mol_type = other RNA
ctcacctctcaaggtgggcct

SEQ ID NO: 7511 - RNA, 21 nt, synthetic construct
  source 1..21: mol_type = other RNA
ctcactgaatacaacattctc

SEQ ID NO: 7512 - RNA, 21 nt, synthetic construct
  source 1..21: mol_type = other RNA
ctcagacgtttttcggcttat

SEQ ID NO: 7513 - RNA, 21 nt, synthetic construct
  source 1..21: mol_type = other RNA
ctcagatacgttgacatataa

SEQ ID NO: 7514 - RNA, 21 nt, synthetic construct
  source 1..21: mol_type = other RNA
ctcaggatatgcatttagaag

SEQ ID NO: 7515 - RNA, 21 nt, synthetic construct
  source 1..21: mol_type = other RNA
ctcaggcactaagatgagtgt

SEQ ID NO: 7516 - RNA, 21 nt, synthetic construct
  source 1..21: mol_type = other RNA
ctcaggggcaggttgttgcaa

SEQ ID NO: 7517 - RNA, 21 nt, synthetic construct
  source 1..21: mol_type = other RNA
ctcaggtcacaaccatgtatc

SEQ ID NO: 7518 - RNA, 21 nt, synthetic construct
  source 1..21: mol_type = other RNA
ctcataaacattaggtgagtt

SEQ ID NO: 7519 - RNA, 21 nt, synthetic construct
  source 1..21: mol_type = other RNA
ctcatcatcttcccctccatc

SEQ ID NO: 7520 - RNA, 21 nt, synthetic construct
  source 1..21: mol_type = other RNA
ctcatcttagtgcctgagagt

SEQ ID NO: 7521 - RNA, 21 nt, synthetic construct
  source 1..21: mol_type = other RNA
ctcatgtagaccttgtggctc

SEQ ID NO: 7522 - RNA, 21 nt, synthetic construct
  source 1..21: mol_type = other RNA
ctcatttcattcctaacacag

SEQ ID NO: 7523 - RNA, 21 nt, synthetic construct
  source 1..21: mol_type = other RNA
ctccagaaagcaggacaattc

SEQ ID NO: 7524 - RNA, 21 nt, synthetic construct
  source 1..21: mol_type = other RNA
ctccatcatcaccagatcctg

SEQ ID NO: 7525 - RNA, 21 nt, synthetic construct
  source 1..21: mol_type = other RNA
ctccatttgtctggctcataa

SEQ ID NO: 7526 - RNA, 21 nt, synthetic construct
  source 1..21: mol_type = other RNA
ctccctcttcacatggcagcc

SEQ ID NO: 7527 - RNA, 21 nt, synthetic construct
  source 1..21: mol_type = other RNA
ctcctcaactcacctaatgtt

SEQ ID NO: 7528 - RNA, 21 nt, synthetic construct
  source 1..21: mol_type = other RNA
ctccttttggatttatttcag

SEQ ID NO: 7529 - RNA, 21 nt, synthetic construct
  source 1..21: mol_type = other RNA
ctcggtgcctgtaacaaagaa

SEQ ID NO: 7530 - RNA, 21 nt, synthetic construct
  source 1..21: mol_type = other RNA
ctctaagagaagcactttggg

SEQ ID NO: 7531 - RNA, 21 nt, synthetic construct
  source 1..21: mol_type = other RNA
ctctaagtatccccaggatct

SEQ ID NO: 7532 - RNA, 21 nt, synthetic construct
  source 1..21: mol_type = other RNA
ctctaatagtgcttaaaaatc

SEQ ID NO: 7533 - RNA, 21 nt, synthetic construct
  source 1..21: mol_type = other RNA
ctctagtcttccttttccatc

SEQ ID NO: 7534 - RNA, 21 nt, synthetic construct
  source 1..21: mol_type = other RNA
ctctcaaggtgggccttgcta

SEQ ID NO: 7535 - RNA, 21 nt, synthetic construct
  source 1..21: mol_type = other RNA
ctctcaggcactaagatgagt

SEQ ID NO: 7536 - RNA, 21 nt, synthetic construct
  source 1..21: mol_type = other RNA
ctctctctggtcaattttgag

SEQ ID NO: 7537 - RNA, 21 nt, synthetic construct
  source 1..21: mol_type = other RNA
ctctctggtcaattttgagga

SEQ ID NO: 7538 - RNA, 21 nt, synthetic construct
  source 1..21: mol_type = other RNA
ctctcttgcttatctgttagt

SEQ ID NO: 7539 - RNA, 21 nt, synthetic construct
  source 1..21: mol_type = other RNA
ctctctttagtcatacacaca

SEQ ID NO: 7540 - RNA, 21 nt, synthetic construct
  source 1..21: mol_type = other RNA
ctctggaatgggaagacacct

SEQ ID NO: 7541 - RNA, 21 nt, synthetic construct
  source 1..21: mol_type = other RNA
ctctgggctgccatgtgaaga

SEQ ID NO: 7542 - RNA, 21 nt, synthetic construct
  source 1..21: mol_type = other RNA
ctctggtcaattttgaggaat

SEQ ID NO: 7543 - RNA, 21 nt, synthetic construct
  source 1..21: mol_type = other RNA
ctcttagagcttatataagcc

SEQ ID NO: 7544 - RNA, 21 nt, synthetic construct
  source 1..21: mol_type = other RNA
ctcttcacatggcagcccaga

SEQ ID NO: 7545 - RNA, 21 nt, synthetic construct
  source 1..21: mol_type = other RNA
ctcttgcttatctgttagttt

SEQ ID NO: 7546 - RNA, 21 nt, synthetic construct
  source 1..21: mol_type = other RNA
ctctttagcttattatgcaag

SEQ ID NO: 7547 - RNA, 21 nt, synthetic construct
  source 1..21: mol_type = other RNA
ctctttagtcatacacacaca

SEQ ID NO: 7548 - RNA, 21 nt, synthetic construct
  source 1..21: mol_type = other RNA
ctctttcagcctctttagctt

SEQ ID NO: 7549 - RNA, 21 nt, synthetic construct
  source 1..21: mol_type = other RNA
ctgaaagacagtcccccttga

SEQ ID NO: 7550 - RNA, 21 nt, synthetic construct
  source 1..21: mol_type = other RNA
ctgaaagaggccaatgcccca

SEQ ID NO: 7551 - RNA, 21 nt, synthetic construct
  source 1..21: mol_type = other RNA
ctgaaataaatccaaaaggag

SEQ ID NO: 7552 - RNA, 21 nt, synthetic construct
  source 1..21: mol_type = other RNA
ctgaatacaacattctcggtg

SEQ ID NO: 7553 - RNA, 21 nt, synthetic construct
  source 1..21: mol_type = other RNA
ctgacaatcaactctaatagt

SEQ ID NO: 7554 - RNA, 21 nt, synthetic construct
  source 1..21: mol_type = other RNA
ctgagagtatttaggcagatt

SEQ ID NO: 7555 - RNA, 21 nt, synthetic construct
  source 1..21: mol_type = other RNA
ctgagattcctcaaaattgac

SEQ ID NO: 7556 - RNA, 21 nt, synthetic construct
  source 1..21: mol_type = other RNA
ctgagccacaaggtctacatg

SEQ ID NO: 7557 - RNA, 21 nt, synthetic construct
  source 1..21: mol_type = other RNA
ctgagccatcggtgaaactaa

SEQ ID NO: 7558 - RNA, 21 nt, synthetic construct
  source 1..21: mol_type = other RNA
ctgagctctctctggtcaatt

SEQ ID NO: 7559 - RNA, 21 nt, synthetic construct
  source 1..21: mol_type = other RNA
ctgaggatttaagggatggaa

SEQ ID NO: 7560 - RNA, 21 nt, synthetic construct
  source 1..21: mol_type = other RNA
ctgatcatttatatgtcaacg

SEQ ID NO: 7561 - RNA, 21 nt, synthetic construct
  source 1..21: mol_type = other RNA
ctgcactactgggcagatgtg

SEQ ID NO: 7562 - RNA, 21 nt, synthetic construct
  source 1..21: mol_type = other RNA
ctgccagtggggcattggcct

SEQ ID NO: 7563 - RNA, 21 nt, synthetic construct
  source 1..21: mol_type = other RNA
ctgccatgtgaagagggagaa

SEQ ID NO: 7564 - RNA, 21 nt, synthetic construct
  source 1..21: mol_type = other RNA
ctgcccagtagtgcagtagct

SEQ ID NO: 7565 - RNA, 21 nt, synthetic construct
  source 1..21: mol_type = other RNA
ctgcccccaggtagctgctgc

SEQ ID NO: 7566 - RNA, 21 nt, synthetic construct
  source 1..21: mol_type = other RNA
ctgcccctgagccacaaggtc

SEQ ID NO: 7567 - RNA, 21 nt, synthetic construct
  source 1..21: mol_type = other RNA
ctgcctaaatactctcaggca

SEQ ID NO: 7568 - RNA, 21 nt, synthetic construct
  source 1..21: mol_type = other RNA
ctgcgggcccacatctgccca

SEQ ID NO: 7569 - RNA, 21 nt, synthetic construct
  source 1..21: mol_type = other RNA
ctgctgcgggcccacatctgc

SEQ ID NO: 7570 - RNA, 21 nt, synthetic construct
  source 1..21: mol_type = other RNA
ctgctttctggagtgaagtat

SEQ ID NO: 7571 - RNA, 21 nt, synthetic construct
  source 1..21: mol_type = other RNA
ctgctttttcatgcttctccc

SEQ ID NO: 7572 - RNA, 21 nt, synthetic construct
  source 1..21: mol_type = other RNA
ctggaaatacacatgctgtgt

SEQ ID NO: 7573 - RNA, 21 nt, synthetic construct
  source 1..21: mol_type = other RNA
ctggaatgggaagacacctat

SEQ ID NO: 7574 - RNA, 21 nt, synthetic construct
  source 1..21: mol_type = other RNA
ctggagtgaagtataagaagg

SEQ ID NO: 7575 - RNA, 21 nt, synthetic construct
  source 1..21: mol_type = other RNA
ctggcagcatcttcacttcta

SEQ ID NO: 7576 - RNA, 21 nt, synthetic construct
  source 1..21: mol_type = other RNA
ctggctcataaacattaggtg

SEQ ID NO: 7577 - RNA, 21 nt, synthetic construct
  source 1..21: mol_type = other RNA
ctgggcagatgtgggcccgca

SEQ ID NO: 7578 - RNA, 21 nt, synthetic construct
  source 1..21: mol_type = other RNA
ctgggctgccatgtgaagagg

SEQ ID NO: 7579 - RNA, 21 nt, synthetic construct
  source 1..21: mol_type = other RNA
ctgggctgtactttgtatatt

SEQ ID NO: 7580 - RNA, 21 nt, synthetic construct
  source 1..21: mol_type = other RNA
ctggggatacttagagttcct

SEQ ID NO: 7581 - RNA, 21 nt, synthetic construct
  source 1..21: mol_type = other RNA
ctgggggcagtgttcaatctt

SEQ ID NO: 7582 - RNA, 21 nt, synthetic construct
  source 1..21: mol_type = other RNA
ctggtaagattgaacactgcc

SEQ ID NO: 7583 - RNA, 21 nt, synthetic construct
  source 1..21: mol_type = other RNA
ctggtagctgctttttcatgc

SEQ ID NO: 7584 - RNA, 21 nt, synthetic construct
  source 1..21: mol_type = other RNA
ctggtcaattttgaggaatct

SEQ ID NO: 7585 - RNA, 21 nt, synthetic construct
  source 1..21: mol_type = other RNA
ctggtgatgatggaggggaag

SEQ ID NO: 7586 - RNA, 21 nt, synthetic construct
  source 1..21: mol_type = other RNA
ctgtaacaaagaatcataatg

SEQ ID NO: 7587 - RNA, 21 nt, synthetic construct
  source 1..21: mol_type = other RNA
ctgtactttgtatattccaaa

SEQ ID NO: 7588 - RNA, 21 nt, synthetic construct
  source 1..21: mol_type = other RNA
ctgtagctcctcaactcacct

SEQ ID NO: 7589 - RNA, 21 nt, synthetic construct
  source 1..21: mol_type = other RNA
ctgtctttcagatacatggtt

SEQ ID NO: 7590 - RNA, 21 nt, synthetic construct
  source 1..21: mol_type = other RNA
ctgtggtctcaaggtccactt

SEQ ID NO: 7591 - RNA, 21 nt, synthetic construct
  source 1..21: mol_type = other RNA
ctgtgttaggaatgaaatgag

SEQ ID NO: 7592 - RNA, 21 nt, synthetic construct
  source 1..21: mol_type = other RNA
ctgttagtttcaccgatggct

SEQ ID NO: 7593 - RNA, 21 nt, synthetic construct
  source 1..21: mol_type = other RNA
cttaaatcctcaggtcacaac

SEQ ID NO: 7594 - RNA, 21 nt, synthetic construct
  source 1..21: mol_type = other RNA
cttacatgcatttgaggtcaa

SEQ ID NO: 7595 - RNA, 21 nt, synthetic construct
  source 1..21: mol_type = other RNA
cttaccagtgctgatcattta

SEQ ID NO: 7596 - RNA, 21 nt, synthetic construct
  source 1..21: mol_type = other RNA
cttacttgacctcaaatgcat

SEQ ID NO: 7597 - RNA, 21 nt, synthetic construct
  source 1..21: mol_type = other RNA
cttagagcttatataagccga

SEQ ID NO: 7598 - RNA, 21 nt, synthetic construct
  source 1..21: mol_type = other RNA
cttagagttcctcatgtagac

SEQ ID NO: 7599 - RNA, 21 nt, synthetic construct
  source 1..21: mol_type = other RNA
cttagtgcctgagagtattta

SEQ ID NO: 7600 - RNA, 21 nt, synthetic construct
  source 1..21: mol_type = other RNA
cttatacttcactccagaaag

SEQ ID NO: 7601 - RNA, 21 nt, synthetic construct
  source 1..21: mol_type = other RNA
cttatataagccgaaaaacgt

SEQ ID NO: 7602 - RNA, 21 nt, synthetic construct
  source 1..21: mol_type = other RNA
cttatataagctctaagagaa

SEQ ID NO: 7603 - RNA, 21 nt, synthetic construct
  source 1..21: mol_type = other RNA
cttatctgttagtttcaccga

SEQ ID NO: 7604 - RNA, 21 nt, synthetic construct
  source 1..21: mol_type = other RNA
cttattatgcaagcctctagt

SEQ ID NO: 7605 - RNA, 21 nt, synthetic construct
  source 1..21: mol_type = other RNA
cttcacaatatctacattctc

SEQ ID NO: 7606 - RNA, 21 nt, synthetic construct
  source 1..21: mol_type = other RNA
cttcacatggcagcccagagt

SEQ ID NO: 7607 - RNA, 21 nt, synthetic construct
  source 1..21: mol_type = other RNA
cttcactccagaaagcaggac

SEQ ID NO: 7608 - RNA, 21 nt, synthetic construct
  source 1..21: mol_type = other RNA
cttcacttctaaatgcatatc

SEQ ID NO: 7609 - RNA, 21 nt, synthetic construct
  source 1..21: mol_type = other RNA
cttcccattccagaggcatgg

SEQ ID NO: 7610 - RNA, 21 nt, synthetic construct
  source 1..21: mol_type = other RNA
cttcccctccatcatcaccag

SEQ ID NO: 7611 - RNA, 21 nt, synthetic construct
  source 1..21: mol_type = other RNA
cttccggggtcaatcttgcaa

SEQ ID NO: 7612 - RNA, 21 nt, synthetic construct
  source 1..21: mol_type = other RNA
cttccgtcatattcctccatt

SEQ ID NO: 7613 - RNA, 21 nt, synthetic construct
  source 1..21: mol_type = other RNA
cttcctgacaatcaactctaa

SEQ ID NO: 7614 - RNA, 21 nt, synthetic construct
  source 1..21: mol_type = other RNA
cttccttttccatcccttaaa

SEQ ID NO: 7615 - RNA, 21 nt, synthetic construct
  source 1..21: mol_type = other RNA
cttctaaatgcatatcctgag

SEQ ID NO: 7616 - RNA, 21 nt, synthetic construct
  source 1..21: mol_type = other RNA
cttctccctcttcacatggca

SEQ ID NO: 7617 - RNA, 21 nt, synthetic construct
  source 1..21: mol_type = other RNA
cttctcttagagcttatataa

SEQ ID NO: 7618 - RNA, 21 nt, synthetic construct
  source 1..21: mol_type = other RNA
cttcttacatgcatttgaggt

SEQ ID NO: 7619 - RNA, 21 nt, synthetic construct
  source 1..21: mol_type = other RNA
cttcttacttgacctcaaatg

SEQ ID NO: 7620 - RNA, 21 nt, synthetic construct
  source 1..21: mol_type = other RNA
cttcttatacttcactccaga

SEQ ID NO: 7621 - RNA, 21 nt, synthetic construct
  source 1..21: mol_type = other RNA
cttgaccaaatgcaacccata

SEQ ID NO: 7622 - RNA, 21 nt, synthetic construct
  source 1..21: mol_type = other RNA
cttgacctcaaatgcatgtaa

SEQ ID NO: 7623 - RNA, 21 nt, synthetic construct
  source 1..21: mol_type = other RNA
cttgagaccacagggttcaaa

SEQ ID NO: 7624 - RNA, 21 nt, synthetic construct
  source 1..21: mol_type = other RNA
cttgagaggtgagttaaaagg

SEQ ID NO: 7625 - RNA, 21 nt, synthetic construct
  source 1..21: mol_type = other RNA
cttgaggtagcaaggcccacc

SEQ ID NO: 7626 - RNA, 21 nt, synthetic construct
  source 1..21: mol_type = other RNA
cttgagttggacttgcctgaa

SEQ ID NO: 7627 - RNA, 21 nt, synthetic construct
  source 1..21: mol_type = other RNA
cttgcaacaacctgcccctga

SEQ ID NO: 7628 - RNA, 21 nt, synthetic construct
  source 1..21: mol_type = other RNA
cttgcataataagctaaagag

SEQ ID NO: 7629 - RNA, 21 nt, synthetic construct
  source 1..21: mol_type = other RNA
cttgcctgaaataaatccaaa

SEQ ID NO: 7630 - RNA, 21 nt, synthetic construct
  source 1..21: mol_type = other RNA
cttgctacctcaagggggact

SEQ ID NO: 7631 - RNA, 21 nt, synthetic construct
  source 1..21: mol_type = other RNA
cttgcttatctgttagtttca

SEQ ID NO: 7632 - RNA, 21 nt, synthetic construct
  source 1..21: mol_type = other RNA
cttggttcatgtcttcttact

SEQ ID NO: 7633 - RNA, 21 nt, synthetic construct
  source 1..21: mol_type = other RNA
cttgtgatcaatgaaactggg

SEQ ID NO: 7634 - RNA, 21 nt, synthetic construct
  source 1..21: mol_type = other RNA
cttgtggctcaggggcaggtt

SEQ ID NO: 7635 - RNA, 21 nt, synthetic construct
  source 1..21: mol_type = other RNA
cttgttgaaagctccttttgg

SEQ ID NO: 7636 - RNA, 21 nt, synthetic construct
  source 1..21: mol_type = other RNA
ctttagcttattatgcaagcc

SEQ ID NO: 7637 - RNA, 21 nt, synthetic construct
  source 1..21: mol_type = other RNA
ctttagtcatacacacacaca

SEQ ID NO: 7638 - RNA, 21 nt, synthetic construct
  source 1..21: mol_type = other RNA
ctttcagatacatggttgtga

SEQ ID NO: 7639 - RNA, 21 nt, synthetic construct
  source 1..21: mol_type = other RNA
ctttcagcctctttagcttat

SEQ ID NO: 7640 - RNA, 21 nt, synthetic construct
  source 1..21: mol_type = other RNA
ctttccattatgattctttgt

SEQ ID NO: 7641 - RNA, 21 nt, synthetic construct
  source 1..21: mol_type = other RNA
ctttctggagtgaagtataag

SEQ ID NO: 7642 - RNA, 21 nt, synthetic construct
  source 1..21: mol_type = other RNA
ctttggaatatacaaagtaca

SEQ ID NO: 7643 - RNA, 21 nt, synthetic construct
  source 1..21: mol_type = other RNA
ctttgggattctttccattat

SEQ ID NO: 7644 - RNA, 21 nt, synthetic construct
  source 1..21: mol_type = other RNA
ctttgttacaggcaccgagaa

SEQ ID NO: 7645 - RNA, 21 nt, synthetic construct
  source 1..21: mol_type = other RNA
cttttaactcacctctcaagg

SEQ ID NO: 7646 - RNA, 21 nt, synthetic construct
  source 1..21: mol_type = other RNA
cttttcaatctgcctaaatac

SEQ ID NO: 7647 - RNA, 21 nt, synthetic construct
  source 1..21: mol_type = other RNA
cttttccatcccttaaatcct

SEQ ID NO: 7648 - RNA, 21 nt, synthetic construct
  source 1..21: mol_type = other RNA
cttttggatttatttcaggca

SEQ ID NO: 7649 - RNA, 21 nt, synthetic construct
  source 1..21: mol_type = other RNA
ctttttcatgcttctccctct

SEQ ID NO: 7650 - RNA, 21 nt, synthetic construct
  source 1..21: mol_type = other RNA
gaaaaacgtctgagattcctc

SEQ ID NO: 7651 - RNA, 21 nt, synthetic construct
  source 1..21: mol_type = other RNA
gaaaaagcagctaccaggtgt

SEQ ID NO: 7652 - RNA, 21 nt, synthetic construct
  source 1..21: mol_type = other RNA
gaaaacatcattagtagctga

SEQ ID NO: 7653 - RNA, 21 nt, synthetic construct
  source 1..21: mol_type = other RNA
gaaaaggaagactagaggctt

SEQ ID NO: 7654 - RNA, 21 nt, synthetic construct
  source 1..21: mol_type = other RNA
gaaaaggacaccttttaactc

SEQ ID NO: 7655 - RNA, 21 nt, synthetic construct
  source 1..21: mol_type = other RNA
gaaaatatgggttgcatttgg

SEQ ID NO: 7656 - RNA, 21 nt, synthetic construct
  source 1..21: mol_type = other RNA
gaaactaacagataagcaaga

SEQ ID NO: 7657 - RNA, 21 nt, synthetic construct
  source 1..21: mol_type = other RNA
gaaactgggctgtactttgta

SEQ ID NO: 7658 - RNA, 21 nt, synthetic construct
  source 1..21: mol_type = other RNA
gaaagaatcccaaagtgcttc

SEQ ID NO: 7659 - RNA, 21 nt, synthetic construct
  source 1..21: mol_type = other RNA
gaaagacagtcccccttgagg

SEQ ID NO: 7660 - RNA, 21 nt, synthetic construct
  source 1..21: mol_type = other RNA
gaaagaggccaatgccccact

SEQ ID NO: 7661 - RNA, 21 nt, synthetic construct
  source 1..21: mol_type = other RNA
gaaagcaggacaattccatag

SEQ ID NO: 7662 - RNA, 21 nt, synthetic construct
  source 1..21: mol_type = other RNA
gaaagctccttttggatttat

SEQ ID NO: 7663 - RNA, 21 nt, synthetic construct
  source 1..21: mol_type = other RNA
gaaataaatccaaaaggagct

SEQ ID NO: 7664 - RNA, 21 nt, synthetic construct
  source 1..21: mol_type = other RNA
gaaatacacatgctgtgttag

SEQ ID NO: 7665 - RNA, 21 nt, synthetic construct
  source 1..21: mol_type = other RNA
gaaatgagtccccaaaacatc

SEQ ID NO: 7666 - RNA, 21 nt, synthetic construct
  source 1..21: mol_type = other RNA
gaacacctggtagctgctttt

SEQ ID NO: 7667 - RNA, 21 nt, synthetic construct
  source 1..21: mol_type = other RNA
gaacactgcccccaggtagct

SEQ ID NO: 7668 - RNA, 21 nt, synthetic construct
  source 1..21: mol_type = other RNA
gaacatagaactctgggctgc

SEQ ID NO: 7669 - RNA, 21 nt, synthetic construct
  source 1..21: mol_type = other RNA
gaaccaagtggaccttgagac

SEQ ID NO: 7670 - RNA, 21 nt, synthetic construct
  source 1..21: mol_type = other RNA
gaaccctgtggtctcaaggtc

SEQ ID NO: 7671 - RNA, 21 nt, synthetic construct
  source 1..21: mol_type = other RNA
gaactctaagtatccccagga

SEQ ID NO: 7672 - RNA, 21 nt, synthetic construct
  source 1..21: mol_type = other RNA
gaactctgggctgccatgtga

SEQ ID NO: 7673 - RNA, 21 nt, synthetic construct
  source 1..21: mol_type = other RNA
gaagaacatagaactctgggc

SEQ ID NO: 7674 - RNA, 21 nt, synthetic construct
  source 1..21: mol_type = other RNA
gaagacacctatggaattgtc

SEQ ID NO: 7675 - RNA, 21 nt, synthetic construct
  source 1..21: mol_type = other RNA
gaagacatgaaccaagtggac

SEQ ID NO: 7676 - RNA, 21 nt, synthetic construct
  source 1..21: mol_type = other RNA
gaagaccctcactgaatacaa

SEQ ID NO: 7677 - RNA, 21 nt, synthetic construct
  source 1..21: mol_type = other RNA
gaagactagaggcttgcataa

SEQ ID NO: 7678 - RNA, 21 nt, synthetic construct
  source 1..21: mol_type = other RNA
gaagagggagaagcatgaaaa

SEQ ID NO: 7679 - RNA, 21 nt, synthetic construct
  source 1..21: mol_type = other RNA
gaagatgatgagctactgcac

SEQ ID NO: 7680 - RNA, 21 nt, synthetic construct
  source 1..21: mol_type = other RNA
gaagatgctgccagtggggca

SEQ ID NO: 7681 - RNA, 21 nt, synthetic construct
  source 1..21: mol_type = other RNA
gaagcactttgggattctttc

SEQ ID NO: 7682 - RNA, 21 nt, synthetic construct
  source 1..21: mol_type = other RNA
gaagcatgaaaaagcagctac

SEQ ID NO: 7683 - RNA, 21 nt, synthetic construct
  source 1..21: mol_type = other RNA
gaagcattcaaaatcttgacc

SEQ ID NO: 7684 - RNA, 21 nt, synthetic construct
  source 1..21: mol_type = other RNA
gaagggtggccttgtgatcaa

SEQ ID NO: 7685 - RNA, 21 nt, synthetic construct
  source 1..21: mol_type = other RNA
gaagtataagaagggtggcct

SEQ ID NO: 7686 - RNA, 21 nt, synthetic construct
  source 1..21: mol_type = other RNA
gaagtatactttggaatatac

SEQ ID NO: 7687 - RNA, 21 nt, synthetic construct
  source 1..21: mol_type = other RNA
gaagtgaagatgctgccagtg

SEQ ID NO: 7688 - RNA, 21 nt, synthetic construct
  source 1..21: mol_type = other RNA
gaatacaacattctcggtgcc

SEQ ID NO: 7689 - RNA, 21 nt, synthetic construct
  source 1..21: mol_type = other RNA
gaatatacaaagtacagccca

SEQ ID NO: 7690 - RNA, 21 nt, synthetic construct
  source 1..21: mol_type = other RNA
gaatatgacggaagaacatag

SEQ ID NO: 7691 - RNA, 21 nt, synthetic construct
  source 1..21: mol_type = other RNA
gaatcataatggaaagaatcc

SEQ ID NO: 7692 - RNA, 21 nt, synthetic construct
  source 1..21: mol_type = other RNA
gaatcccaaagtgcttctctt

SEQ ID NO: 7693 - RNA, 21 nt, synthetic construct
  source 1..21: mol_type = other RNA
gaatctcagacgtttttcggc

SEQ ID NO: 7694 - RNA, 21 nt, synthetic construct
  source 1..21: mol_type = other RNA
gaatgaaatgagtccccaaaa

SEQ ID NO: 7695 - RNA, 21 nt, synthetic construct
  source 1..21: mol_type = other RNA
gaatgcttcctgacaatcaac

SEQ ID NO: 7696 - RNA, 21 nt, synthetic construct
  source 1..21: mol_type = other RNA
gaatgggaagacacctatgga

SEQ ID NO: 7697 - RNA, 21 nt, synthetic construct
  source 1..21: mol_type = other RNA
gaatgtagatattgtgaagta

SEQ ID NO: 7698 - RNA, 21 nt, synthetic construct
  source 1..21: mol_type = other RNA
gaatgttgtattcagtgaggg

SEQ ID NO: 7699 - RNA, 21 nt, synthetic construct
  source 1..21: mol_type = other RNA
gaattgtcctgctttctggag

SEQ ID NO: 7700 - RNA, 21 nt, synthetic construct
  source 1..21: mol_type = other RNA
gacaaatggaggaatatgacg

SEQ ID NO: 7701 - RNA, 21 nt, synthetic construct
  source 1..21: mol_type = other RNA
gacaatcaactctaatagtgc

SEQ ID NO: 7702 - RNA, 21 nt, synthetic construct
  source 1..21: mol_type = other RNA
gacaatcaatgatttttaagc

SEQ ID NO: 7703 - RNA, 21 nt, synthetic construct
  source 1..21: mol_type = other RNA
gacaattccataggtgtcttc

SEQ ID NO: 7704 - RNA, 21 nt, synthetic construct
  source 1..21: mol_type = other RNA
gacacctatggaattgtcctg

SEQ ID NO: 7705 - RNA, 21 nt, synthetic construct
  source 1..21: mol_type = other RNA
gacaccttttaactcacctct

SEQ ID NO: 7706 - RNA, 21 nt, synthetic construct
  source 1..21: mol_type = other RNA
gacagtcccccttgaggtagc

SEQ ID NO: 7707 - RNA, 21 nt, synthetic construct
  source 1..21: mol_type = other RNA
gacatataaatgatcagcact

SEQ ID NO: 7708 - RNA, 21 nt, synthetic construct
  source 1..21: mol_type = other RNA
gacatgaaccaagtggacctt

SEQ ID NO: 7709 - RNA, 21 nt, synthetic construct
  source 1..21: mol_type = other RNA
gacattttgaaccctgtggtc

SEQ ID NO: 7710 - RNA, 21 nt, synthetic construct
  source 1..21: mol_type = other RNA
gaccaaatgcaacccatattt

SEQ ID NO: 7711 - RNA, 21 nt, synthetic construct
  source 1..21: mol_type = other RNA
gaccacagggttcaaaatgtc

SEQ ID NO: 7712 - RNA, 21 nt, synthetic construct
  source 1..21: mol_type = other RNA
gaccagagagagctcagatac

SEQ ID NO: 7713 - RNA, 21 nt, synthetic construct
  source 1..21: mol_type = other RNA
gaccccggaagtatactttgg

SEQ ID NO: 7714 - RNA, 21 nt, synthetic construct
  source 1..21: mol_type = other RNA
gaccctcactgaatacaacat

SEQ ID NO: 7715 - RNA, 21 nt, synthetic construct
  source 1..21: mol_type = other RNA
gacctcaaatgcatgtaagaa

SEQ ID NO: 7716 - RNA, 21 nt, synthetic construct
  source 1..21: mol_type = other RNA
gacctgaggatttaagggatg

SEQ ID NO: 7717 - RNA, 21 nt, synthetic construct
  source 1..21: mol_type = other RNA
gaccttgagaccacagggttc

SEQ ID NO: 7718 - RNA, 21 nt, synthetic construct
  source 1..21: mol_type = other RNA
gaccttgagttggacttgcct

SEQ ID NO: 7719 - RNA, 21 nt, synthetic construct
  source 1..21: mol_type = other RNA
gaccttgtggctcaggggcag

SEQ ID NO: 7720 - RNA, 21 nt, synthetic construct
  source 1..21: mol_type = other RNA
gacggaagaacatagaactct

SEQ ID NO: 7721 - RNA, 21 nt, synthetic construct
  source 1..21: mol_type = other RNA
gacgtttttcggcttatataa

SEQ ID NO: 7722 - RNA, 21 nt, synthetic construct
  source 1..21: mol_type = other RNA
gactaaagagagaatgtagat

SEQ ID NO: 7723 - RNA, 21 nt, synthetic construct
  source 1..21: mol_type = other RNA
gactagaggcttgcataataa

SEQ ID NO: 7724 - RNA, 21 nt, synthetic construct
  source 1..21: mol_type = other RNA
gactattccttgttgaaagct

SEQ ID NO: 7725 - RNA, 21 nt, synthetic construct
  source 1..21: mol_type = other RNA
gactcatttcattcctaacac

SEQ ID NO: 7726 - RNA, 21 nt, synthetic construct
  source 1..21: mol_type = other RNA
gactgtctttcagatacatgg

SEQ ID NO: 7727 - RNA, 21 nt, synthetic construct
  source 1..21: mol_type = other RNA
gacttgcctgaaataaatcca

SEQ ID NO: 7728 - RNA, 21 nt, synthetic construct
  source 1..21: mol_type = other RNA
gagaagcactttgggattctt

SEQ ID NO: 7729 - RNA, 21 nt, synthetic construct
  source 1..21: mol_type = other RNA
gagaagcatgaaaaagcagct

SEQ ID NO: 7730 - RNA, 21 nt, synthetic construct
  source 1..21: mol_type = other RNA
gagaatgtagatattgtgaag

SEQ ID NO: 7731 - RNA, 21 nt, synthetic construct
  source 1..21: mol_type = other RNA
gagaatgttgtattcagtgag

SEQ ID NO: 7732 - RNA, 21 nt, synthetic construct
  source 1..21: mol_type = other RNA
gagaccacagggttcaaaatg

SEQ ID NO: 7733 - RNA, 21 nt, synthetic construct
  source 1..21: mol_type = other RNA
gagagaatgtagatattgtga

SEQ ID NO: 7734 - RNA, 21 nt, synthetic construct
  source 1..21: mol_type = other RNA
gagagagctcagatacgttga

SEQ ID NO: 7735 - RNA, 21 nt, synthetic construct
  source 1..21: mol_type = other RNA
gagagatgttttggggactca

SEQ ID NO: 7736 - RNA, 21 nt, synthetic construct
  source 1..21: mol_type = other RNA
gagagctcagatacgttgaca

SEQ ID NO: 7737 - RNA, 21 nt, synthetic construct
  source 1..21: mol_type = other RNA
gagaggtgagttaaaaggtgt

SEQ ID NO: 7738 - RNA, 21 nt, synthetic construct
  source 1..21: mol_type = other RNA
gagagtatttaggcagattga

SEQ ID NO: 7739 - RNA, 21 nt, synthetic construct
  source 1..21: mol_type = other RNA
gagatgttttggggactcatt

SEQ ID NO: 7740 - RNA, 21 nt, synthetic construct
  source 1..21: mol_type = other RNA
gagattcctcaaaattgacca

SEQ ID NO: 7741 - RNA, 21 nt, synthetic construct
  source 1..21: mol_type = other RNA
gagccacaaggtctacatgag

SEQ ID NO: 7742 - RNA, 21 nt, synthetic construct
  source 1..21: mol_type = other RNA
gagccagacaaatggaggaat

SEQ ID NO: 7743 - RNA, 21 nt, synthetic construct
  source 1..21: mol_type = other RNA
gagccatcggtgaaactaaca

SEQ ID NO: 7744 - RNA, 21 nt, synthetic construct
  source 1..21: mol_type = other RNA
gagctacagacattttgaacc

SEQ ID NO: 7745 - RNA, 21 nt, synthetic construct
  source 1..21: mol_type = other RNA
gagctactgcactactgggca

SEQ ID NO: 7746 - RNA, 21 nt, synthetic construct
  source 1..21: mol_type = other RNA
gagctcagatacgttgacata

SEQ ID NO: 7747 - RNA, 21 nt, synthetic construct
  source 1..21: mol_type = other RNA
gagctctctctggtcaatttt

SEQ ID NO: 7748 - RNA, 21 nt, synthetic construct
  source 1..21: mol_type = other RNA
gagcttatataagccgaaaaa

SEQ ID NO: 7749 - RNA, 21 nt, synthetic construct
  source 1..21: mol_type = other RNA
gaggaactctaagtatcccca

SEQ ID NO: 7750 - RNA, 21 nt, synthetic construct
  source 1..21: mol_type = other RNA
gaggaatatgacggaagaaca

SEQ ID NO: 7751 - RNA, 21 nt, synthetic construct
  source 1..21: mol_type = other RNA
gaggaatctcagacgtttttc

SEQ ID NO: 7752 - RNA, 21 nt, synthetic construct
  source 1..21: mol_type = other RNA
gaggagctacagacattttga

SEQ ID NO: 7753 - RNA, 21 nt, synthetic construct
  source 1..21: mol_type = other RNA
gaggatttaagggatggaaaa

SEQ ID NO: 7754 - RNA, 21 nt, synthetic construct
  source 1..21: mol_type = other RNA
gaggcatggaccttgagttgg

SEQ ID NO: 7755 - RNA, 21 nt, synthetic construct
  source 1..21: mol_type = other RNA
gaggccaatgccccactggca

SEQ ID NO: 7756 - RNA, 21 nt, synthetic construct
  source 1..21: mol_type = other RNA
gaggctgaaagaggccaatgc

SEQ ID NO: 7757 - RNA, 21 nt, synthetic construct
  source 1..21: mol_type = other RNA
gaggcttgcataataagctaa

SEQ ID NO: 7758 - RNA, 21 nt, synthetic construct
  source 1..21: mol_type = other RNA
gagggagaagcatgaaaaagc

SEQ ID NO: 7759 - RNA, 21 nt, synthetic construct
  source 1..21: mol_type = other RNA
gaggggaagatgatgagctac

SEQ ID NO: 7760 - RNA, 21 nt, synthetic construct
  source 1..21: mol_type = other RNA
gagggtcttcttacatgcatt

SEQ ID NO: 7761 - RNA, 21 nt, synthetic construct
  source 1..21: mol_type = other RNA
gaggtagcaaggcccaccttg

SEQ ID NO: 7762 - RNA, 21 nt, synthetic construct
  source 1..21: mol_type = other RNA
gaggtcaagtaagaagacatg

SEQ ID NO: 7763 - RNA, 21 nt, synthetic construct
  source 1..21: mol_type = other RNA
gaggtgagttaaaaggtgtcc

SEQ ID NO: 7764 - RNA, 21 nt, synthetic construct
  source 1..21: mol_type = other RNA
gagtatttaggcagattgaaa

SEQ ID NO: 7765 - RNA, 21 nt, synthetic construct
  source 1..21: mol_type = other RNA
gagtccccaaaacatctctct

SEQ ID NO: 7766 - RNA, 21 nt, synthetic construct
  source 1..21: mol_type = other RNA
gagtgaagtataagaagggtg

SEQ ID NO: 7767 - RNA, 21 nt, synthetic construct
  source 1..21: mol_type = other RNA
gagtgtagaacacctggtagc

SEQ ID NO: 7768 - RNA, 21 nt, synthetic construct
  source 1..21: mol_type = other RNA
gagttaaaaggtgtccttttc

SEQ ID NO: 7769 - RNA, 21 nt, synthetic construct
  source 1..21: mol_type = other RNA
gagttcctcatgtagaccttg

SEQ ID NO: 7770 - RNA, 21 nt, synthetic construct
  source 1..21: mol_type = other RNA
gagttctatgttcttccgtca

SEQ ID NO: 7771 - RNA, 21 nt, synthetic construct
  source 1..21: mol_type = other RNA
gagttgaggagctacagacat

SEQ ID NO: 7772 - RNA, 21 nt, synthetic construct
  source 1..21: mol_type = other RNA
gagttgattgtcaggaagcat

SEQ ID NO: 7773 - RNA, 21 nt, synthetic construct
  source 1..21: mol_type = other RNA
gagttggacttgcctgaaata

SEQ ID NO: 7774 - RNA, 21 nt, synthetic construct
  source 1..21: mol_type = other RNA
gataagcaagagagatgtttt

SEQ ID NO: 7775 - RNA, 21 nt, synthetic construct
  source 1..21: mol_type = other RNA
gatacatggttgtgacctgag

SEQ ID NO: 7776 - RNA, 21 nt, synthetic construct
  source 1..21: mol_type = other RNA
gatacgttgacatataaatga

SEQ ID NO: 7777 - RNA, 21 nt, synthetic construct
  source 1..21: mol_type = other RNA
gatacttagagttcctcatgt

SEQ ID NO: 7778 - RNA, 21 nt, synthetic construct
  source 1..21: mol_type = other RNA
gatatgcatttagaagtgaag

SEQ ID NO: 7779 - RNA, 21 nt, synthetic construct
  source 1..21: mol_type = other RNA
gatcaatgaaactgggctgta

SEQ ID NO: 7780 - RNA, 21 nt, synthetic construct
  source 1..21: mol_type = other RNA
gatcacaaggccacccttctt

SEQ ID NO: 7781 - RNA, 21 nt, synthetic construct
  source 1..21: mol_type = other RNA
gatcagcactggtaagattga

SEQ ID NO: 7782 - RNA, 21 nt, synthetic construct
  source 1..21: mol_type = other RNA
gatcatttatatgtcaacgta

SEQ ID NO: 7783 - RNA, 21 nt, synthetic construct
  source 1..21: mol_type = other RNA
gatcctggggatacttagagt

SEQ ID NO: 7784 - RNA, 21 nt, synthetic construct
  source 1..21: mol_type = other RNA
gatctggtgatgatggagggg

SEQ ID NO: 7785 - RNA, 21 nt, synthetic construct
  source 1..21: mol_type = other RNA
gatgagctactgcactactgg

SEQ ID NO: 7786 - RNA, 21 nt, synthetic construct
  source 1..21: mol_type = other RNA
gatgagtgtagaacacctggt

SEQ ID NO: 7787 - RNA, 21 nt, synthetic construct
  source 1..21: mol_type = other RNA
gatgatgagctactgcactac

SEQ ID NO: 7788 - RNA, 21 nt, synthetic construct
  source 1..21: mol_type = other RNA
gatgatggaggggaagatgat

SEQ ID NO: 7789 - RNA, 21 nt, synthetic construct
  source 1..21: mol_type = other RNA
gatgctgccagtggggcattg

SEQ ID NO: 7790 - RNA, 21 nt, synthetic construct
  source 1..21: mol_type = other RNA
gatggaaaaggaagactagag

SEQ ID NO: 7791 - RNA, 21 nt, synthetic construct
  source 1..21: mol_type = other RNA
gatggaggggaagatgatgag

SEQ ID NO: 7792 - RNA, 21 nt, synthetic construct
  source 1..21: mol_type = other RNA
gatggctcaggatatgcattt

SEQ ID NO: 7793 - RNA, 21 nt, synthetic construct
  source 1..21: mol_type = other RNA
gatgtgcatttttgtgaaatg

SEQ ID NO: 7794 - RNA, 21 nt, synthetic construct
  source 1..21: mol_type = other RNA
gatgtgggcccgcagcagcta

SEQ ID NO: 7795 - RNA, 21 nt, synthetic construct
  source 1..21: mol_type = other RNA
gatgttttggggactcatttc

SEQ ID NO: 7796 - RNA, 21 nt, synthetic construct
  source 1..21: mol_type = other RNA
gattcctcaaaattgaccaga

SEQ ID NO: 7797 - RNA, 21 nt, synthetic construct
  source 1..21: mol_type = other RNA
gattctttccattatgattct

SEQ ID NO: 7798 - RNA, 21 nt, synthetic construct
  source 1..21: mol_type = other RNA
gattctttgttacaggcaccg

SEQ ID NO: 7799 - RNA, 21 nt, synthetic construct
  source 1..21: mol_type = other RNA
gattgaaaaggacacctttta

SEQ ID NO: 7800 - RNA, 21 nt, synthetic construct
  source 1..21: mol_type = other RNA
gattgaacactgcccccaggt

SEQ ID NO: 7801 - RNA, 21 nt, synthetic construct
  source 1..21: mol_type = other RNA
gattgaccccggaagtatact

SEQ ID NO: 7802 - RNA, 21 nt, synthetic construct
  source 1..21: mol_type = other RNA
gattgtcagctactaatgatg

SEQ ID NO: 7803 - RNA, 21 nt, synthetic construct
  source 1..21: mol_type = other RNA
gattgtcaggaagcattcaaa

SEQ ID NO: 7804 - RNA, 21 nt, synthetic construct
  source 1..21: mol_type = other RNA
gatttaagggatggaaaagga

SEQ ID NO: 7805 - RNA, 21 nt, synthetic construct
  source 1..21: mol_type = other RNA
gatttatttcaggcaagtcca

SEQ ID NO: 7806 - RNA, 21 nt, synthetic construct
  source 1..21: mol_type = other RNA
gattttgaatgcttcctgaca

SEQ ID NO: 7807 - RNA, 21 nt, synthetic construct
  source 1..21: mol_type = other RNA
gatttttaagcactattagag

SEQ ID NO: 7808 - RNA, 21 nt, synthetic construct
  source 1..21: mol_type = other RNA
gcaacaacctgcccctgagcc

SEQ ID NO: 7809 - RNA, 21 nt, synthetic construct
  source 1..21: mol_type = other RNA
gcaacccatattttcctaata

SEQ ID NO: 7810 - RNA, 21 nt, synthetic construct
  source 1..21: mol_type = other RNA
gcaagagagatgttttgggga

SEQ ID NO: 7811 - RNA, 21 nt, synthetic construct
  source 1..21: mol_type = other RNA
gcaagattgaccccggaagta

SEQ ID NO: 7812 - RNA, 21 nt, synthetic construct
  source 1..21: mol_type = other RNA
gcaagcctctagtcttccttt

SEQ ID NO: 7813 - RNA, 21 nt, synthetic construct
  source 1..21: mol_type = other RNA
gcaaggcccaccttgagaggt

SEQ ID NO: 7814 - RNA, 21 nt, synthetic construct
  source 1..21: mol_type = other RNA
gcaagtccaactcaaggtcca

SEQ ID NO: 7815 - RNA, 21 nt, synthetic construct
  source 1..21: mol_type = other RNA
gcaattgtaggggtgtgtgtg

SEQ ID NO: 7816 - RNA, 21 nt, synthetic construct
  source 1..21: mol_type = other RNA
gcaccgagaatgttgtattca

SEQ ID NO: 7817 - RNA, 21 nt, synthetic construct
  source 1..21: mol_type = other RNA
gcactaagatgagtgtagaac

SEQ ID NO: 7818 - RNA, 21 nt, synthetic construct
  source 1..21: mol_type = other RNA
gcactactgggcagatgtggg

SEQ ID NO: 7819 - RNA, 21 nt, synthetic construct
  source 1..21: mol_type = other RNA
gcactattagagttgattgtc

SEQ ID NO: 7820 - RNA, 21 nt, synthetic construct
  source 1..21: mol_type = other RNA
gcactggaaatacacatgctg

SEQ ID NO: 7821 - RNA, 21 nt, synthetic construct
  source 1..21: mol_type = other RNA
gcactggtaagattgaacact

SEQ ID NO: 7822 - RNA, 21 nt, synthetic construct
  source 1..21: mol_type = other RNA
gcactttgggattctttccat

SEQ ID NO: 7823 - RNA, 21 nt, synthetic construct
  source 1..21: mol_type = other RNA
gcagatgtgggcccgcagcag

SEQ ID NO: 7824 - RNA, 21 nt, synthetic construct
  source 1..21: mol_type = other RNA
gcagattgaaaaggacacctt

SEQ ID NO: 7825 - RNA, 21 nt, synthetic construct
  source 1..21: mol_type = other RNA
gcagcagctacctgggggcag

SEQ ID NO: 7826 - RNA, 21 nt, synthetic construct
  source 1..21: mol_type = other RNA
gcagcatcttcacttctaaat

SEQ ID NO: 7827 - RNA, 21 nt, synthetic construct
  source 1..21: mol_type = other RNA
gcagcccagagttctatgttc

SEQ ID NO: 7828 - RNA, 21 nt, synthetic construct
  source 1..21: mol_type = other RNA
gcagctaccaggtgttctaca

SEQ ID NO: 7829 - RNA, 21 nt, synthetic construct
  source 1..21: mol_type = other RNA
gcagctacctgggggcagtgt

SEQ ID NO: 7830 - RNA, 21 nt, synthetic construct
  source 1..21: mol_type = other RNA
gcaggacaattccataggtgt

SEQ ID NO: 7831 - RNA, 21 nt, synthetic construct
  source 1..21: mol_type = other RNA
gcaggttgttgcaagattgac

SEQ ID NO: 7832 - RNA, 21 nt, synthetic construct
  source 1..21: mol_type = other RNA
gcagtagctcatcatcttccc

SEQ ID NO: 7833 - RNA, 21 nt, synthetic construct
  source 1..21: mol_type = other RNA
gcagtgttcaatcttaccagt

SEQ ID NO: 7834 - RNA, 21 nt, synthetic construct
  source 1..21: mol_type = other RNA
gcataataagctaaagaggct

SEQ ID NO: 7835 - RNA, 21 nt, synthetic construct
  source 1..21: mol_type = other RNA
gcatatcctgagccatcggtg

SEQ ID NO: 7836 - RNA, 21 nt, synthetic construct
  source 1..21: mol_type = other RNA
gcatcttcacttctaaatgca

SEQ ID NO: 7837 - RNA, 21 nt, synthetic construct
  source 1..21: mol_type = other RNA
gcatgaaaaagcagctaccag

SEQ ID NO: 7838 - RNA, 21 nt, synthetic construct
  source 1..21: mol_type = other RNA
gcatgactattccttgttgaa

SEQ ID NO: 7839 - RNA, 21 nt, synthetic construct
  source 1..21: mol_type = other RNA
gcatggaccttgagttggact

SEQ ID NO: 7840 - RNA, 21 nt, synthetic construct
  source 1..21: mol_type = other RNA
gcatgtaagaagaccctcact

SEQ ID NO: 7841 - RNA, 21 nt, synthetic construct
  source 1..21: mol_type = other RNA
gcatgtgtatttccagtgcaa

SEQ ID NO: 7842 - RNA, 21 nt, synthetic construct
  source 1..21: mol_type = other RNA
gcattcaaaatcttgaccaaa

SEQ ID NO: 7843 - RNA, 21 nt, synthetic construct
  source 1..21: mol_type = other RNA
gcattggcctctttcagcctc

SEQ ID NO: 7844 - RNA, 21 nt, synthetic construct
  source 1..21: mol_type = other RNA
gcatttagaagtgaagatgct

SEQ ID NO: 7845 - RNA, 21 nt, synthetic construct
  source 1..21: mol_type = other RNA
gcatttgaggtcaagtaagaa

SEQ ID NO: 7846 - RNA, 21 nt, synthetic construct
  source 1..21: mol_type = other RNA
gcatttggtcaagattttgaa

SEQ ID NO: 7847 - RNA, 21 nt, synthetic construct
  source 1..21: mol_type = other RNA
gcatttttgtgaaatgaaaac

SEQ ID NO: 7848 - RNA, 21 nt, synthetic construct
  source 1..21: mol_type = other RNA
gccaatgccccactggcagca

SEQ ID NO: 7849 - RNA, 21 nt, synthetic construct
  source 1..21: mol_type = other RNA
gccacaaggtctacatgagga

SEQ ID NO: 7850 - RNA, 21 nt, synthetic construct
  source 1..21: mol_type = other RNA
gccacccttcttatacttcac

SEQ ID NO: 7851 - RNA, 21 nt, synthetic construct
  source 1..21: mol_type = other RNA
gccagacaaatggaggaatat

SEQ ID NO: 7852 - RNA, 21 nt, synthetic construct
  source 1..21: mol_type = other RNA
gccagtggggcattggcctct

SEQ ID NO: 7853 - RNA, 21 nt, synthetic construct
  source 1..21: mol_type = other RNA
gccatcggtgaaactaacaga

SEQ ID NO: 7854 - RNA, 21 nt, synthetic construct
  source 1..21: mol_type = other RNA
gccatgtgaagagggagaagc

SEQ ID NO: 7855 - RNA, 21 nt, synthetic construct
  source 1..21: mol_type = other RNA
gcccacatctgcccagtagtg

SEQ ID NO: 7856 - RNA, 21 nt, synthetic construct
  source 1..21: mol_type = other RNA
gcccaccttgagaggtgagtt

SEQ ID NO: 7857 - RNA, 21 nt, synthetic construct
  source 1..21: mol_type = other RNA
gcccagagttctatgttcttc

SEQ ID NO: 7858 - RNA, 21 nt, synthetic construct
  source 1..21: mol_type = other RNA
gcccagtagtgcagtagctca

SEQ ID NO: 7859 - RNA, 21 nt, synthetic construct
  source 1..21: mol_type = other RNA
gcccagtttcattgatcacaa

SEQ ID NO: 7860 - RNA, 21 nt, synthetic construct
  source 1..21: mol_type = other RNA
gccccactggcagcatcttca

SEQ ID NO: 7861 - RNA, 21 nt, synthetic construct
  source 1..21: mol_type = other RNA
gcccccaggtagctgctgcgg

SEQ ID NO: 7862 - RNA, 21 nt, synthetic construct
  source 1..21: mol_type = other RNA
gcccctgagccacaaggtcta

SEQ ID NO: 7863 - RNA, 21 nt, synthetic construct
  source 1..21: mol_type = other RNA
gcccgcagcagctacctgggg

SEQ ID NO: 7864 - RNA, 21 nt, synthetic construct
  source 1..21: mol_type = other RNA
gccgaaaaacgtctgagattc

SEQ ID NO: 7865 - RNA, 21 nt, synthetic construct
  source 1..21: mol_type = other RNA
gcctaaatactctcaggcact

SEQ ID NO: 7866 - RNA, 21 nt, synthetic construct
  source 1..21: mol_type = other RNA
gcctctagtcttccttttcca

SEQ ID NO: 7867 - RNA, 21 nt, synthetic construct
  source 1..21: mol_type = other RNA
gcctctggaatgggaagacac

SEQ ID NO: 7868 - RNA, 21 nt, synthetic construct
  source 1..21: mol_type = other RNA
gcctctttagcttattatgca

SEQ ID NO: 7869 - RNA, 21 nt, synthetic construct
  source 1..21: mol_type = other RNA
gcctctttcagcctctttagc

SEQ ID NO: 7870 - RNA, 21 nt, synthetic construct
  source 1..21: mol_type = other RNA
gcctgaaataaatccaaaagg

SEQ ID NO: 7871 - RNA, 21 nt, synthetic construct
  source 1..21: mol_type = other RNA
gcctgagagtatttaggcaga

SEQ ID NO: 7872 - RNA, 21 nt, synthetic construct
  source 1..21: mol_type = other RNA
gcctgtaacaaagaatcataa

SEQ ID NO: 7873 - RNA, 21 nt, synthetic construct
  source 1..21: mol_type = other RNA
gccttgctacctcaaggggga

SEQ ID NO: 7874 - RNA, 21 nt, synthetic construct
  source 1..21: mol_type = other RNA
gccttgtgatcaatgaaactg

SEQ ID NO: 7875 - RNA, 21 nt, synthetic construct
  source 1..21: mol_type = other RNA
gcgggcccacatctgcccagt

SEQ ID NO: 7876 - RNA, 21 nt, synthetic construct
  source 1..21: mol_type = other RNA
gctaaagaggctgaaagaggc

SEQ ID NO: 7877 - RNA, 21 nt, synthetic construct
  source 1..21: mol_type = other RNA
gctacagacattttgaaccct

SEQ ID NO: 7878 - RNA, 21 nt, synthetic construct
  source 1..21: mol_type = other RNA
gctaccaggtgttctacactc

SEQ ID NO: 7879 - RNA, 21 nt, synthetic construct
  source 1..21: mol_type = other RNA
gctacctcaagggggactgtc

SEQ ID NO: 7880 - RNA, 21 nt, synthetic construct
  source 1..21: mol_type = other RNA
gctacctgggggcagtgttca

SEQ ID NO: 7881 - RNA, 21 nt, synthetic construct
  source 1..21: mol_type = other RNA
gctactaatgatgttttccta

SEQ ID NO: 7882 - RNA, 21 nt, synthetic construct
  source 1..21: mol_type = other RNA
gctactgcactactgggcaga

SEQ ID NO: 7883 - RNA, 21 nt, synthetic construct
  source 1..21: mol_type = other RNA
gctcagatacgttgacatata

SEQ ID NO: 7884 - RNA, 21 nt, synthetic construct
  source 1..21: mol_type = other RNA
gctcaggatatgcatttagaa

SEQ ID NO: 7885 - RNA, 21 nt, synthetic construct
  source 1..21: mol_type = other RNA
gctcaggggcaggttgttgca

SEQ ID NO: 7886 - RNA, 21 nt, synthetic construct
  source 1..21: mol_type = other RNA
gctcataaacattaggtgagt

SEQ ID NO: 7887 - RNA, 21 nt, synthetic construct
  source 1..21: mol_type = other RNA
gctcatcatcttcccctccat

SEQ ID NO: 7888 - RNA, 21 nt, synthetic construct
  source 1..21: mol_type = other RNA
gctcctcaactcacctaatgt

SEQ ID NO: 7889 - RNA, 21 nt, synthetic construct
  source 1..21: mol_type = other RNA
gctccttttggatttatttca

SEQ ID NO: 7890 - RNA, 21 nt, synthetic construct
  source 1..21: mol_type = other RNA
gctctaagagaagcactttgg

SEQ ID NO: 7891 - RNA, 21 nt, synthetic construct
  source 1..21: mol_type = other RNA
gctctctctggtcaattttga

SEQ ID NO: 7892 - RNA, 21 nt, synthetic construct
  source 1..21: mol_type = other RNA
gctgaaagaggccaatgcccc

SEQ ID NO: 7893 - RNA, 21 nt, synthetic construct
  source 1..21: mol_type = other RNA
gctgacaatcaatgattttta

SEQ ID NO: 7894 - RNA, 21 nt, synthetic construct
  source 1..21: mol_type = other RNA
gctgatcatttatatgtcaac

SEQ ID NO: 7895 - RNA, 21 nt, synthetic construct
  source 1..21: mol_type = other RNA
gctgccagtggggcattggcc

SEQ ID NO: 7896 - RNA, 21 nt, synthetic construct
  source 1..21: mol_type = other RNA
gctgccatgtgaagagggaga

SEQ ID NO: 7897 - RNA, 21 nt, synthetic construct
  source 1..21: mol_type = other RNA
gctgcgggcccacatctgccc

SEQ ID NO: 7898 - RNA, 21 nt, synthetic construct
  source 1..21: mol_type = other RNA
gctgctgcgggcccacatctg

SEQ ID NO: 7899 - RNA, 21 nt, synthetic construct
  source 1..21: mol_type = other RNA
gctgctttttcatgcttctcc

SEQ ID NO: 7900 - RNA, 21 nt, synthetic construct
  source 1..21: mol_type = other RNA
gctgtactttgtatattccaa

SEQ ID NO: 7901 - RNA, 21 nt, synthetic construct
  source 1..21: mol_type = other RNA
gctgtgttaggaatgaaatga

SEQ ID NO: 7902 - RNA, 21 nt, synthetic construct
  source 1..21: mol_type = other RNA
gcttaaaaatcattgattgtc

SEQ ID NO: 7903 - RNA, 21 nt, synthetic construct
  source 1..21: mol_type = other RNA
gcttatataagccgaaaaacg

SEQ ID NO: 7904 - RNA, 21 nt, synthetic construct
  source 1..21: mol_type = other RNA
gcttatataagctctaagaga

SEQ ID NO: 7905 - RNA, 21 nt, synthetic construct
  source 1..21: mol_type = other RNA
gcttatctgttagtttcaccg

SEQ ID NO: 7906 - RNA, 21 nt, synthetic construct
  source 1..21: mol_type = other RNA
gcttattatgcaagcctctag

SEQ ID NO: 7907 - RNA, 21 nt, synthetic construct
  source 1..21: mol_type = other RNA
gcttcctgacaatcaactcta

SEQ ID NO: 7908 - RNA, 21 nt, synthetic construct
  source 1..21: mol_type = other RNA
gcttctccctcttcacatggc

SEQ ID NO: 7909 - RNA, 21 nt, synthetic construct
  source 1..21: mol_type = other RNA
gcttctcttagagcttatata

SEQ ID NO: 7910 - RNA, 21 nt, synthetic construct
  source 1..21: mol_type = other RNA
gcttgcataataagctaaaga

SEQ ID NO: 7911 - RNA, 21 nt, synthetic construct
  source 1..21: mol_type = other RNA
gctttctggagtgaagtataa

SEQ ID NO: 7912 - RNA, 21 nt, synthetic construct
  source 1..21: mol_type = other RNA
gctttttcatgcttctccctc

SEQ ID NO: 7913 - RNA, 21 nt, synthetic construct
  source 1..21: mol_type = other RNA
ggaaaacatcattagtagctg

SEQ ID NO: 7914 - RNA, 21 nt, synthetic construct
  source 1..21: mol_type = other RNA
ggaaaaggaagactagaggct

SEQ ID NO: 7915 - RNA, 21 nt, synthetic construct
  source 1..21: mol_type = other RNA
ggaaaatatgggttgcatttg

SEQ ID NO: 7916 - RNA, 21 nt, synthetic construct
  source 1..21: mol_type = other RNA
ggaaagaatcccaaagtgctt

SEQ ID NO: 7917 - RNA, 21 nt, synthetic construct
  source 1..21: mol_type = other RNA
ggaaatacacatgctgtgtta

SEQ ID NO: 7918 - RNA, 21 nt, synthetic construct
  source 1..21: mol_type = other RNA
ggaactctaagtatccccagg

SEQ ID NO: 7919 - RNA, 21 nt, synthetic construct
  source 1..21: mol_type = other RNA
ggaagaacatagaactctggg

SEQ ID NO: 7920 - RNA, 21 nt, synthetic construct
  source 1..21: mol_type = other RNA
ggaagacacctatggaattgt

SEQ ID NO: 7921 - RNA, 21 nt, synthetic construct
  source 1..21: mol_type = other RNA
ggaagactagaggcttgcata

SEQ ID NO: 7922 - RNA, 21 nt, synthetic construct
  source 1..21: mol_type = other RNA
ggaagatgatgagctactgca

SEQ ID NO: 7923 - RNA, 21 nt, synthetic construct
  source 1..21: mol_type = other RNA
ggaagcattcaaaatcttgac

SEQ ID NO: 7924 - RNA, 21 nt, synthetic construct
  source 1..21: mol_type = other RNA
ggaagtatactttggaatata

SEQ ID NO: 7925 - RNA, 21 nt, synthetic construct
  source 1..21: mol_type = other RNA
ggaatatacaaagtacagccc

SEQ ID NO: 7926 - RNA, 21 nt, synthetic construct
  source 1..21: mol_type = other RNA
ggaatatgacggaagaacata

SEQ ID NO: 7927 - RNA, 21 nt, synthetic construct
  source 1..21: mol_type = other RNA
ggaatctcagacgtttttcgg

SEQ ID NO: 7928 - RNA, 21 nt, synthetic construct
  source 1..21: mol_type = other RNA
ggaatgaaatgagtccccaaa

SEQ ID NO: 7929 - RNA, 21 nt, synthetic construct
  source 1..21: mol_type = other RNA
ggaatgggaagacacctatgg

SEQ ID NO: 7930 - RNA, 21 nt, synthetic construct
  source 1..21: mol_type = other RNA
ggaattgtcctgctttctgga

SEQ ID NO: 7931 - RNA, 21 nt, synthetic construct
  source 1..21: mol_type = other RNA
ggacaattccataggtgtctt

SEQ ID NO: 7932 - RNA, 21 nt, synthetic construct
  source 1..21: mol_type = other RNA
ggacaccttttaactcacctc

SEQ ID NO: 7933 - RNA, 21 nt, synthetic construct
  source 1..21: mol_type = other RNA
ggaccttgagaccacagggtt

SEQ ID NO: 7934 - RNA, 21 nt, synthetic construct
  source 1..21: mol_type = other RNA
ggaccttgagttggacttgcc

SEQ ID NO: 7935 - RNA, 21 nt, synthetic construct
  source 1..21: mol_type = other RNA
ggactcatttcattcctaaca

SEQ ID NO: 7936 - RNA, 21 nt, synthetic construct
  source 1..21: mol_type = other RNA
ggactgtctttcagatacatg

SEQ ID NO: 7937 - RNA, 21 nt, synthetic construct
  source 1..21: mol_type = other RNA
ggacttgcctgaaataaatcc

SEQ ID NO: 7938 - RNA, 21 nt, synthetic construct
  source 1..21: mol_type = other RNA
ggagaagcatgaaaaagcagc

SEQ ID NO: 7939 - RNA, 21 nt, synthetic construct
  source 1..21: mol_type = other RNA
ggagctacagacattttgaac

SEQ ID NO: 7940 - RNA, 21 nt, synthetic construct
  source 1..21: mol_type = other RNA
ggagctttcaacaaggaatag

SEQ ID NO: 7941 - RNA, 21 nt, synthetic construct
  source 1..21: mol_type = other RNA
ggaggaatatgacggaagaac

SEQ ID NO: 7942 - RNA, 21 nt, synthetic construct
  source 1..21: mol_type = other RNA
ggaggggaagatgatgagcta

SEQ ID NO: 7943 - RNA, 21 nt, synthetic construct
  source 1..21: mol_type = other RNA
ggagtgaagtataagaagggt

SEQ ID NO: 7944 - RNA, 21 nt, synthetic construct
  source 1..21: mol_type = other RNA
ggatacttagagttcctcatg

SEQ ID NO: 7945 - RNA, 21 nt, synthetic construct
  source 1..21: mol_type = other RNA
ggatatgcatttagaagtgaa

SEQ ID NO: 7946 - RNA, 21 nt, synthetic construct
  source 1..21: mol_type = other RNA
ggatctggtgatgatggaggg

SEQ ID NO: 7947 - RNA, 21 nt, synthetic construct
  source 1..21: mol_type = other RNA
ggatggaaaaggaagactaga

SEQ ID NO: 7948 - RNA, 21 nt, synthetic construct
  source 1..21: mol_type = other RNA
ggattctttccattatgattc

SEQ ID NO: 7949 - RNA, 21 nt, synthetic construct
  source 1..21: mol_type = other RNA
ggatttaagggatggaaaagg

SEQ ID NO: 7950 - RNA, 21 nt, synthetic construct
  source 1..21: mol_type = other RNA
ggatttatttcaggcaagtcc

SEQ ID NO: 7951 - RNA, 21 nt, synthetic construct
  source 1..21: mol_type = other RNA
ggcaagtccaactcaaggtcc

SEQ ID NO: 7952 - RNA, 21 nt, synthetic construct
  source 1..21: mol_type = other RNA
ggcaccgagaatgttgtattc

SEQ ID NO: 7953 - RNA, 21 nt, synthetic construct
  source 1..21: mol_type = other RNA
ggcactaagatgagtgtagaa

SEQ ID NO: 7954 - RNA, 21 nt, synthetic construct
  source 1..21: mol_type = other RNA
ggcagatgtgggcccgcagca

SEQ ID NO: 7955 - RNA, 21 nt, synthetic construct
  source 1..21: mol_type = other RNA
ggcagattgaaaaggacacct

SEQ ID NO: 7956 - RNA, 21 nt, synthetic construct
  source 1..21: mol_type = other RNA
ggcagcatcttcacttctaaa

SEQ ID NO: 7957 - RNA, 21 nt, synthetic construct
  source 1..21: mol_type = other RNA
ggcagcccagagttctatgtt

SEQ ID NO: 7958 - RNA, 21 nt, synthetic construct
  source 1..21: mol_type = other RNA
ggcaggttgttgcaagattga

SEQ ID NO: 7959 - RNA, 21 nt, synthetic construct
  source 1..21: mol_type = other RNA
ggcagtgttcaatcttaccag

SEQ ID NO: 7960 - RNA, 21 nt, synthetic construct
  source 1..21: mol_type = other RNA
ggcatggaccttgagttggac

SEQ ID NO: 7961 - RNA, 21 nt, synthetic construct
  source 1..21: mol_type = other RNA
ggcattggcctctttcagcct

SEQ ID NO: 7962 - RNA, 21 nt, synthetic construct
  source 1..21: mol_type = other RNA
ggccaatgccccactggcagc

SEQ ID NO: 7963 - RNA, 21 nt, synthetic construct
  source 1..21: mol_type = other RNA
ggccacccttcttatacttca

SEQ ID NO: 7964 - RNA, 21 nt, synthetic construct
  source 1..21: mol_type = other RNA
ggcccacatctgcccagtagt

SEQ ID NO: 7965 - RNA, 21 nt, synthetic construct
  source 1..21: mol_type = other RNA
ggcccaccttgagaggtgagt

SEQ ID NO: 7966 - RNA, 21 nt, synthetic construct
  source 1..21: mol_type = other RNA
ggcccgcagcagctacctggg

SEQ ID NO: 7967 - RNA, 21 nt, synthetic construct
  source 1..21: mol_type = other RNA
ggcctctttcagcctctttag

SEQ ID NO: 7968 - RNA, 21 nt, synthetic construct
  source 1..21: mol_type = other RNA
ggccttgctacctcaaggggg

SEQ ID NO: 7969 - RNA, 21 nt, synthetic construct
  source 1..21: mol_type = other RNA
ggccttgtgatcaatgaaact

SEQ ID NO: 7970 - RNA, 21 nt, synthetic construct
  source 1..21: mol_type = other RNA
ggctcaggatatgcatttaga

SEQ ID NO: 7971 - RNA, 21 nt, synthetic construct
  source 1..21: mol_type = other RNA
ggctcaggggcaggttgttgc

SEQ ID NO: 7972 - RNA, 21 nt, synthetic construct
  source 1..21: mol_type = other RNA
ggctcataaacattaggtgag

SEQ ID NO: 7973 - RNA, 21 nt, synthetic construct
  source 1..21: mol_type = other RNA
ggctgaaagaggccaatgccc

SEQ ID NO: 7974 - RNA, 21 nt, synthetic construct
  source 1..21: mol_type = other RNA
ggctgccatgtgaagagggag

SEQ ID NO: 7975 - RNA, 21 nt, synthetic construct
  source 1..21: mol_type = other RNA
ggctgtactttgtatattcca

SEQ ID NO: 7976 - RNA, 21 nt, synthetic construct
  source 1..21: mol_type = other RNA
ggcttatataagctctaagag

SEQ ID NO: 7977 - RNA, 21 nt, synthetic construct
  source 1..21: mol_type = other RNA
ggcttgcataataagctaaag

SEQ ID NO: 7978 - RNA, 21 nt, synthetic construct
  source 1..21: mol_type = other RNA
gggaagacacctatggaattg

SEQ ID NO: 7979 - RNA, 21 nt, synthetic construct
  source 1..21: mol_type = other RNA
gggaagatgatgagctactgc

SEQ ID NO: 7980 - RNA, 21 nt, synthetic construct
  source 1..21: mol_type = other RNA
gggactcatttcattcctaac

SEQ ID NO: 7981 - RNA, 21 nt, synthetic construct
  source 1..21: mol_type = other RNA
gggactgtctttcagatacat

SEQ ID NO: 7982 - RNA, 21 nt, synthetic construct
  source 1..21: mol_type = other RNA
gggagaagcatgaaaaagcag

SEQ ID NO: 7983 - RNA, 21 nt, synthetic construct
  source 1..21: mol_type = other RNA
gggatacttagagttcctcat

SEQ ID NO: 7984 - RNA, 21 nt, synthetic construct
  source 1..21: mol_type = other RNA
gggatggaaaaggaagactag

SEQ ID NO: 7985 - RNA, 21 nt, synthetic construct
  source 1..21: mol_type = other RNA
gggattctttccattatgatt

SEQ ID NO: 7986 - RNA, 21 nt, synthetic construct
  source 1..21: mol_type = other RNA
gggcagatgtgggcccgcagc

SEQ ID NO: 7987 - RNA, 21 nt, synthetic construct
  source 1..21: mol_type = other RNA
gggcaggttgttgcaagattg

SEQ ID NO: 7988 - RNA, 21 nt, synthetic construct
  source 1..21: mol_type = other RNA
gggcagtgttcaatcttacca

SEQ ID NO: 7989 - RNA, 21 nt, synthetic construct
  source 1..21: mol_type = other RNA
gggcattggcctctttcagcc

SEQ ID NO: 7990 - RNA, 21 nt, synthetic construct
  source 1..21: mol_type = other RNA
gggcccacatctgcccagtag

SEQ ID NO: 7991 - RNA, 21 nt, synthetic construct
  source 1..21: mol_type = other RNA
gggcccgcagcagctacctgg

SEQ ID NO: 7992 - RNA, 21 nt, synthetic construct
  source 1..21: mol_type = other RNA
gggccttgctacctcaagggg

SEQ ID NO: 7993 - RNA, 21 nt, synthetic construct
  source 1..21: mol_type = other RNA
gggctgccatgtgaagaggga

SEQ ID NO: 7994 - RNA, 21 nt, synthetic construct
  source 1..21: mol_type = other RNA
gggctgtactttgtatattcc

SEQ ID NO: 7995 - RNA, 21 nt, synthetic construct
  source 1..21: mol_type = other RNA
ggggaagatgatgagctactg

SEQ ID NO: 7996 - RNA, 21 nt, synthetic construct
  source 1..21: mol_type = other RNA
ggggactcatttcattcctaa

SEQ ID NO: 7997 - RNA, 21 nt, synthetic construct
  source 1..21: mol_type = other RNA
ggggactgtctttcagataca

SEQ ID NO: 7998 - RNA, 21 nt, synthetic construct
  source 1..21: mol_type = other RNA
ggggatacttagagttcctca

SEQ ID NO: 7999 - RNA, 21 nt, synthetic construct
  source 1..21: mol_type = other RNA
ggggcaggttgttgcaagatt

SEQ ID NO: 8000 - RNA, 21 nt, synthetic construct
  source 1..21: mol_type = other RNA
ggggcagtgttcaatcttacc

SEQ ID NO: 8001 - RNA, 21 nt, synthetic construct
  source 1..21: mol_type = other RNA
ggggcattggcctctttcagc

SEQ ID NO: 8002 - RNA, 21 nt, synthetic construct
  source 1..21: mol_type = other RNA
gggggactgtctttcagatac

SEQ ID NO: 8003 - RNA, 21 nt, synthetic construct
  source 1..21: mol_type = other RNA
gggggcagtgttcaatcttac

SEQ ID NO: 8004 - RNA, 21 nt, synthetic construct
  source 1..21: mol_type = other RNA
ggggtcaatcttgcaacaacc

SEQ ID NO: 8005 - RNA, 21 nt, synthetic construct
  source 1..21: mol_type = other RNA
gggtcaatcttgcaacaacct

SEQ ID NO: 8006 - RNA, 21 nt, synthetic construct
  source 1..21: mol_type = other RNA
gggtcttcttacatgcatttg

SEQ ID NO: 8007 - RNA, 21 nt, synthetic construct
  source 1..21: mol_type = other RNA
gggtggccttgtgatcaatga

SEQ ID NO: 8008 - RNA, 21 nt, synthetic construct
  source 1..21: mol_type = other RNA
gggttcaaaatgtctgtagct

SEQ ID NO: 8009 - RNA, 21 nt, synthetic construct
  source 1..21: mol_type = other RNA
gggttgcatttggtcaagatt

SEQ ID NO: 8010 - RNA, 21 nt, synthetic construct
  source 1..21: mol_type = other RNA
ggtaagattgaacactgcccc

SEQ ID NO: 8011 - RNA, 21 nt, synthetic construct
  source 1..21: mol_type = other RNA
ggtagcaaggcccaccttgag

SEQ ID NO: 8012 - RNA, 21 nt, synthetic construct
  source 1..21: mol_type = other RNA
ggtagctgctgcgggcccaca

SEQ ID NO: 8013 - RNA, 21 nt, synthetic construct
  source 1..21: mol_type = other RNA
ggtagctgctttttcatgctt

SEQ ID NO: 8014 - RNA, 21 nt, synthetic construct
  source 1..21: mol_type = other RNA
ggtcaagattttgaatgcttc

SEQ ID NO: 8015 - RNA, 21 nt, synthetic construct
  source 1..21: mol_type = other RNA
ggtcaagtaagaagacatgaa

SEQ ID NO: 8016 - RNA, 21 nt, synthetic construct
  source 1..21: mol_type = other RNA
ggtcaatcttgcaacaacctg

SEQ ID NO: 8017 - RNA, 21 nt, synthetic construct
  source 1..21: mol_type = other RNA
ggtcaattttgaggaatctca

SEQ ID NO: 8018 - RNA, 21 nt, synthetic construct
  source 1..21: mol_type = other RNA
ggtcacaaccatgtatctgaa

SEQ ID NO: 8019 - RNA, 21 nt, synthetic construct
  source 1..21: mol_type = other RNA
ggtccacttggttcatgtctt

SEQ ID NO: 8020 - RNA, 21 nt, synthetic construct
  source 1..21: mol_type = other RNA
ggtccatgcctctggaatggg

SEQ ID NO: 8021 - RNA, 21 nt, synthetic construct
  source 1..21: mol_type = other RNA
ggtctacatgaggaactctaa

SEQ ID NO: 8022 - RNA, 21 nt, synthetic construct
  source 1..21: mol_type = other RNA
ggtctcaaggtccacttggtt

SEQ ID NO: 8023 - RNA, 21 nt, synthetic construct
  source 1..21: mol_type = other RNA
ggtcttcttacatgcatttga

SEQ ID NO: 8024 - RNA, 21 nt, synthetic construct
  source 1..21: mol_type = other RNA
ggtgaaactaacagataagca

SEQ ID NO: 8025 - RNA, 21 nt, synthetic construct
  source 1..21: mol_type = other RNA
ggtgagttaaaaggtgtcctt

SEQ ID NO: 8026 - RNA, 21 nt, synthetic construct
  source 1..21: mol_type = other RNA
ggtgagttgaggagctacaga

SEQ ID NO: 8027 - RNA, 21 nt, synthetic construct
  source 1..21: mol_type = other RNA
ggtgatgatggaggggaagat

SEQ ID NO: 8028 - RNA, 21 nt, synthetic construct
  source 1..21: mol_type = other RNA
ggtgcctgtaacaaagaatca

SEQ ID NO: 8029 - RNA, 21 nt, synthetic construct
  source 1..21: mol_type = other RNA
ggtggccttgtgatcaatgaa

SEQ ID NO: 8030 - RNA, 21 nt, synthetic construct
  source 1..21: mol_type = other RNA
ggtgggccttgctacctcaag

SEQ ID NO: 8031 - RNA, 21 nt, synthetic construct
  source 1..21: mol_type = other RNA
ggtgtccttttcaatctgcct

SEQ ID NO: 8032 - RNA, 21 nt, synthetic construct
  source 1..21: mol_type = other RNA
ggtgtcttcccattccagagg

SEQ ID NO: 8033 - RNA, 21 nt, synthetic construct
  source 1..21: mol_type = other RNA
ggtgttctacactcatcttag

SEQ ID NO: 8034 - RNA, 21 nt, synthetic construct
  source 1..21: mol_type = other RNA
ggttcaaaatgtctgtagctc

SEQ ID NO: 8035 - RNA, 21 nt, synthetic construct
  source 1..21: mol_type = other RNA
ggttcatgtcttcttacttga

SEQ ID NO: 8036 - RNA, 21 nt, synthetic construct
  source 1..21: mol_type = other RNA
ggttgcatttggtcaagattt

SEQ ID NO: 8037 - RNA, 21 nt, synthetic construct
  source 1..21: mol_type = other RNA
ggttgtgacctgaggatttaa

SEQ ID NO: 8038 - RNA, 21 nt, synthetic construct
  source 1..21: mol_type = other RNA
ggttgttgcaagattgacccc

SEQ ID NO: 8039 - RNA, 21 nt, synthetic construct
  source 1..21: mol_type = other RNA
gtaacaaagaatcataatgga

SEQ ID NO: 8040 - RNA, 21 nt, synthetic construct
  source 1..21: mol_type = other RNA
gtaagaagacatgaaccaagt

SEQ ID NO: 8041 - RNA, 21 nt, synthetic construct
  source 1..21: mol_type = other RNA
gtaagaagaccctcactgaat

SEQ ID NO: 8042 - RNA, 21 nt, synthetic construct
  source 1..21: mol_type = other RNA
gtaagattgaacactgccccc

SEQ ID NO: 8043 - RNA, 21 nt, synthetic construct
  source 1..21: mol_type = other RNA
gtacagcccagtttcattgat

SEQ ID NO: 8044 - RNA, 21 nt, synthetic construct
  source 1..21: mol_type = other RNA
gtacatattaggaaaatatgg

SEQ ID NO: 8045 - RNA, 21 nt, synthetic construct
  source 1..21: mol_type = other RNA
gtacttcacaatatctacatt

SEQ ID NO: 8046 - RNA, 21 nt, synthetic construct
  source 1..21: mol_type = other RNA
gtactttgtatattccaaagt

SEQ ID NO: 8047 - RNA, 21 nt, synthetic construct
  source 1..21: mol_type = other RNA
gtagaacacctggtagctgct

SEQ ID NO: 8048 - RNA, 21 nt, synthetic construct
  source 1..21: mol_type = other RNA
gtagaccttgtggctcagggg

SEQ ID NO: 8049 - RNA, 21 nt, synthetic construct
  source 1..21: mol_type = other RNA
gtagatattgtgaagtacata

SEQ ID NO: 8050 - RNA, 21 nt, synthetic construct
  source 1..21: mol_type = other RNA
gtagatgtgcatttttgtgaa

SEQ ID NO: 8051 - RNA, 21 nt, synthetic construct
  source 1..21: mol_type = other RNA
gtagcaaggcccaccttgaga

SEQ ID NO: 8052 - RNA, 21 nt, synthetic construct
  source 1..21: mol_type = other RNA
gtagctcatcatcttcccctc

SEQ ID NO: 8053 - RNA, 21 nt, synthetic construct
  source 1..21: mol_type = other RNA
gtagctcctcaactcacctaa

SEQ ID NO: 8054 - RNA, 21 nt, synthetic construct
  source 1..21: mol_type = other RNA
gtagctgacaatcaatgattt

SEQ ID NO: 8055 - RNA, 21 nt, synthetic construct
  source 1..21: mol_type = other RNA
gtagctgctgcgggcccacat

SEQ ID NO: 8056 - RNA, 21 nt, synthetic construct
  source 1..21: mol_type = other RNA
gtagctgctttttcatgcttc

SEQ ID NO: 8057 - RNA, 21 nt, synthetic construct
  source 1..21: mol_type = other RNA
gtagtgcagtagctcatcatc

SEQ ID NO: 8058 - RNA, 21 nt, synthetic construct
  source 1..21: mol_type = other RNA
gtataagaagggtggccttgt

SEQ ID NO: 8059 - RNA, 21 nt, synthetic construct
  source 1..21: mol_type = other RNA
gtatacttccggggtcaatct

SEQ ID NO: 8060 - RNA, 21 nt, synthetic construct
  source 1..21: mol_type = other RNA
gtatattccaaagtatacttc

SEQ ID NO: 8061 - RNA, 21 nt, synthetic construct
  source 1..21: mol_type = other RNA
gtatccccaggatctggtgat

SEQ ID NO: 8062 - RNA, 21 nt, synthetic construct
  source 1..21: mol_type = other RNA
gtatctgaaagacagtccccc

SEQ ID NO: 8063 - RNA, 21 nt, synthetic construct
  source 1..21: mol_type = other RNA
gtatctgagctctctctggtc

SEQ ID NO: 8064 - RNA, 21 nt, synthetic construct
  source 1..21: mol_type = other RNA
gtatgactaaagagagaatgt

SEQ ID NO: 8065 - RNA, 21 nt, synthetic construct
  source 1..21: mol_type = other RNA
gtattcagtgagggtcttctt

SEQ ID NO: 8066 - RNA, 21 nt, synthetic construct
  source 1..21: mol_type = other RNA
gtatttaggcagattgaaaag

SEQ ID NO: 8067 - RNA, 21 nt, synthetic construct
  source 1..21: mol_type = other RNA
gtatttccagtgcaattgtag

SEQ ID NO: 8068 - RNA, 21 nt, synthetic construct
  source 1..21: mol_type = other RNA
gtcaacgtatctgagctctct

SEQ ID NO: 8069 - RNA, 21 nt, synthetic construct
  source 1..21: mol_type = other RNA
gtcaagattttgaatgcttcc

SEQ ID NO: 8070 - RNA, 21 nt, synthetic construct
  source 1..21: mol_type = other RNA
gtcaagtaagaagacatgaac

SEQ ID NO: 8071 - RNA, 21 nt, synthetic construct
  source 1..21: mol_type = other RNA
gtcaatcttgcaacaacctgc

SEQ ID NO: 8072 - RNA, 21 nt, synthetic construct
  source 1..21: mol_type = other RNA
gtcaattttgaggaatctcag

SEQ ID NO: 8073 - RNA, 21 nt, synthetic construct
  source 1..21: mol_type = other RNA
gtcacaaccatgtatctgaaa

SEQ ID NO: 8074 - RNA, 21 nt, synthetic construct
  source 1..21: mol_type = other RNA
gtcagctactaatgatgtttt

SEQ ID NO: 8075 - RNA, 21 nt, synthetic construct
  source 1..21: mol_type = other RNA
gtcaggaagcattcaaaatct

SEQ ID NO: 8076 - RNA, 21 nt, synthetic construct
  source 1..21: mol_type = other RNA
gtcatattcctccatttgtct

SEQ ID NO: 8077 - RNA, 21 nt, synthetic construct
  source 1..21: mol_type = other RNA
gtccaactcaaggtccatgcc

SEQ ID NO: 8078 - RNA, 21 nt, synthetic construct
  source 1..21: mol_type = other RNA
gtccacttggttcatgtcttc

SEQ ID NO: 8079 - RNA, 21 nt, synthetic construct
  source 1..21: mol_type = other RNA
gtccatgcctctggaatggga

SEQ ID NO: 8080 - RNA, 21 nt, synthetic construct
  source 1..21: mol_type = other RNA
gtccccaaaacatctctcttg

SEQ ID NO: 8081 - RNA, 21 nt, synthetic construct
  source 1..21: mol_type = other RNA
gtcccccttgaggtagcaagg

SEQ ID NO: 8082 - RNA, 21 nt, synthetic construct
  source 1..21: mol_type = other RNA
gtcctgctttctggagtgaag

SEQ ID NO: 8083 - RNA, 21 nt, synthetic construct
  source 1..21: mol_type = other RNA
gtccttttcaatctgcctaaa

SEQ ID NO: 8084 - RNA, 21 nt, synthetic construct
  source 1..21: mol_type = other RNA
gtctacatgaggaactctaag

SEQ ID NO: 8085 - RNA, 21 nt, synthetic construct
  source 1..21: mol_type = other RNA
gtctcaaggtccacttggttc

SEQ ID NO: 8086 - RNA, 21 nt, synthetic construct
  source 1..21: mol_type = other RNA
gtctgagattcctcaaaattg

SEQ ID NO: 8087 - RNA, 21 nt, synthetic construct
  source 1..21: mol_type = other RNA
gtctggctcataaacattagg

SEQ ID NO: 8088 - RNA, 21 nt, synthetic construct
  source 1..21: mol_type = other RNA
gtctgtagctcctcaactcac

SEQ ID NO: 8089 - RNA, 21 nt, synthetic construct
  source 1..21: mol_type = other RNA
gtcttcccattccagaggcat

SEQ ID NO: 8090 - RNA, 21 nt, synthetic construct
  source 1..21: mol_type = other RNA
gtcttccttttccatccctta

SEQ ID NO: 8091 - RNA, 21 nt, synthetic construct
  source 1..21: mol_type = other RNA
gtcttcttacatgcatttgag

SEQ ID NO: 8092 - RNA, 21 nt, synthetic construct
  source 1..21: mol_type = other RNA
gtcttcttacttgacctcaaa

SEQ ID NO: 8093 - RNA, 21 nt, synthetic construct
  source 1..21: mol_type = other RNA
gtctttcagatacatggttgt

SEQ ID NO: 8094 - RNA, 21 nt, synthetic construct
  source 1..21: mol_type = other RNA
gtgaaactaacagataagcaa

SEQ ID NO: 8095 - RNA, 21 nt, synthetic construct
  source 1..21: mol_type = other RNA
gtgaagagggagaagcatgaa

SEQ ID NO: 8096 - RNA, 21 nt, synthetic construct
  source 1..21: mol_type = other RNA
gtgaagatgctgccagtgggg

SEQ ID NO: 8097 - RNA, 21 nt, synthetic construct
  source 1..21: mol_type = other RNA
gtgaagtacatattaggaaaa

SEQ ID NO: 8098 - RNA, 21 nt, synthetic construct
  source 1..21: mol_type = other RNA
gtgaagtataagaagggtggc

SEQ ID NO: 8099 - RNA, 21 nt, synthetic construct
  source 1..21: mol_type = other RNA
gtgacctgaggatttaaggga

SEQ ID NO: 8100 - RNA, 21 nt, synthetic construct
  source 1..21: mol_type = other RNA
gtgagggtcttcttacatgca

SEQ ID NO: 8101 - RNA, 21 nt, synthetic construct
  source 1..21: mol_type = other RNA
gtgagttaaaaggtgtccttt

SEQ ID NO: 8102 - RNA, 21 nt, synthetic construct
  source 1..21: mol_type = other RNA
gtgagttgaggagctacagac

SEQ ID NO: 8103 - RNA, 21 nt, synthetic construct
  source 1..21: mol_type = other RNA
gtgatcaatgaaactgggctg

SEQ ID NO: 8104 - RNA, 21 nt, synthetic construct
  source 1..21: mol_type = other RNA
gtgatgatggaggggaagatg

SEQ ID NO: 8105 - RNA, 21 nt, synthetic construct
  source 1..21: mol_type = other RNA
gtgcaattgtaggggtgtgtg

SEQ ID NO: 8106 - RNA, 21 nt, synthetic construct
  source 1..21: mol_type = other RNA
gtgcagtagctcatcatcttc

SEQ ID NO: 8107 - RNA, 21 nt, synthetic construct
  source 1..21: mol_type = other RNA
gtgcatttttgtgaaatgaaa

SEQ ID NO: 8108 - RNA, 21 nt, synthetic construct
  source 1..21: mol_type = other RNA
gtgcctgagagtatttaggca

SEQ ID NO: 8109 - RNA, 21 nt, synthetic construct
  source 1..21: mol_type = other RNA
gtgcctgtaacaaagaatcat

SEQ ID NO: 8110 - RNA, 21 nt, synthetic construct
  source 1..21: mol_type = other RNA
gtgctgatcatttatatgtca

SEQ ID NO: 8111 - RNA, 21 nt, synthetic construct
  source 1..21: mol_type = other RNA
gtgcttaaaaatcattgattg

SEQ ID NO: 8112 - RNA, 21 nt, synthetic construct
  source 1..21: mol_type = other RNA
gtgcttctcttagagcttata

SEQ ID NO: 8113 - RNA, 21 nt, synthetic construct
  source 1..21: mol_type = other RNA
gtggaccttgagaccacaggg

SEQ ID NO: 8114 - RNA, 21 nt, synthetic construct
  source 1..21: mol_type = other RNA
gtggccttgtgatcaatgaaa

SEQ ID NO: 8115 - RNA, 21 nt, synthetic construct
  source 1..21: mol_type = other RNA
gtggctcaggggcaggttgtt

SEQ ID NO: 8116 - RNA, 21 nt, synthetic construct
  source 1..21: mol_type = other RNA
gtgggcccgcagcagctacct

SEQ ID NO: 8117 - RNA, 21 nt, synthetic construct
  source 1..21: mol_type = other RNA
gtgggccttgctacctcaagg

SEQ ID NO: 8118 - RNA, 21 nt, synthetic construct
  source 1..21: mol_type = other RNA
gtggggcattggcctctttca

SEQ ID NO: 8119 - RNA, 21 nt, synthetic construct
  source 1..21: mol_type = other RNA
gtggtctcaaggtccacttgg

SEQ ID NO: 8120 - RNA, 21 nt, synthetic construct
  source 1..21: mol_type = other RNA
gtgtagaacacctggtagctg

SEQ ID NO: 8121 - RNA, 21 nt, synthetic construct
  source 1..21: mol_type = other RNA
gtgtatgactaaagagagaat

SEQ ID NO: 8122 - RNA, 21 nt, synthetic construct
  source 1..21: mol_type = other RNA
gtgtatttccagtgcaattgt

SEQ ID NO: 8123 - RNA, 21 nt, synthetic construct
  source 1..21: mol_type = other RNA
gtgtccttttcaatctgccta

SEQ ID NO: 8124 - RNA, 21 nt, synthetic construct
  source 1..21: mol_type = other RNA
gtgtcttcccattccagaggc

SEQ ID NO: 8125 - RNA, 21 nt, synthetic construct
  source 1..21: mol_type = other RNA
gtgtgtatgactaaagagaga

SEQ ID NO: 8126 - RNA, 21 nt, synthetic construct
  source 1..21: mol_type = other RNA
gtgtgtgtatgactaaagaga

SEQ ID NO: 8127 - RNA, 21 nt, synthetic construct
  source 1..21: mol_type = other RNA
gtgtgtgtgtatgactaaaga

SEQ ID NO: 8128 - RNA, 21 nt, synthetic construct
  source 1..21: mol_type = other RNA
gtgttaggaatgaaatgagtc

SEQ ID NO: 8129 - RNA, 21 nt, synthetic construct
  source 1..21: mol_type = other RNA
gtgttcaatcttaccagtgct

SEQ ID NO: 8130 - RNA, 21 nt, synthetic construct
  source 1..21: mol_type = other RNA
gtgttctacactcatcttagt

SEQ ID NO: 8131 - RNA, 21 nt, synthetic construct
  source 1..21: mol_type = other RNA
gttaaaaggtgtccttttcaa

SEQ ID NO: 8132 - RNA, 21 nt, synthetic construct
  source 1..21: mol_type = other RNA
gttacaggcaccgagaatgtt

SEQ ID NO: 8133 - RNA, 21 nt, synthetic construct
  source 1..21: mol_type = other RNA
gttaggaatgaaatgagtccc

SEQ ID NO: 8134 - RNA, 21 nt, synthetic construct
  source 1..21: mol_type = other RNA
gttagtttcaccgatggctca

SEQ ID NO: 8135 - RNA, 21 nt, synthetic construct
  source 1..21: mol_type = other RNA
gttcaaaatgtctgtagctcc

SEQ ID NO: 8136 - RNA, 21 nt, synthetic construct
  source 1..21: mol_type = other RNA
gttcaatcttaccagtgctga

SEQ ID NO: 8137 - RNA, 21 nt, synthetic construct
  source 1..21: mol_type = other RNA
gttcatgtcttcttacttgac

SEQ ID NO: 8138 - RNA, 21 nt, synthetic construct
  source 1..21: mol_type = other RNA
gttcctcatgtagaccttgtg

SEQ ID NO: 8139 - RNA, 21 nt, synthetic construct
  source 1..21: mol_type = other RNA
gttctacactcatcttagtgc

SEQ ID NO: 8140 - RNA, 21 nt, synthetic construct
  source 1..21: mol_type = other RNA
gttctatgttcttccgtcata

SEQ ID NO: 8141 - RNA, 21 nt, synthetic construct
  source 1..21: mol_type = other RNA
gttcttccgtcatattcctcc

SEQ ID NO: 8142 - RNA, 21 nt, synthetic construct
  source 1..21: mol_type = other RNA
gttgaaagctccttttggatt

SEQ ID NO: 8143 - RNA, 21 nt, synthetic construct
  source 1..21: mol_type = other RNA
gttgacatataaatgatcagc

SEQ ID NO: 8144 - RNA, 21 nt, synthetic construct
  source 1..21: mol_type = other RNA
gttgaggagctacagacattt

SEQ ID NO: 8145 - RNA, 21 nt, synthetic construct
  source 1..21: mol_type = other RNA
gttgattgtcaggaagcattc

SEQ ID NO: 8146 - RNA, 21 nt, synthetic construct
  source 1..21: mol_type = other RNA
gttgcaagattgaccccggaa

SEQ ID NO: 8147 - RNA, 21 nt, synthetic construct
  source 1..21: mol_type = other RNA
gttgcatttggtcaagatttt

SEQ ID NO: 8148 - RNA, 21 nt, synthetic construct
  source 1..21: mol_type = other RNA
gttggacttgcctgaaataaa

SEQ ID NO: 8149 - RNA, 21 nt, synthetic construct
  source 1..21: mol_type = other RNA
gttgtattcagtgagggtctt

SEQ ID NO: 8150 - RNA, 21 nt, synthetic construct
  source 1..21: mol_type = other RNA
gttgtgacctgaggatttaag

SEQ ID NO: 8151 - RNA, 21 nt, synthetic construct
  source 1..21: mol_type = other RNA
gttgttgcaagattgaccccg

SEQ ID NO: 8152 - RNA, 21 nt, synthetic construct
  source 1..21: mol_type = other RNA
gtttatgagccagacaaatgg

SEQ ID NO: 8153 - RNA, 21 nt, synthetic construct
  source 1..21: mol_type = other RNA
gtttcaccgatggctcaggat

SEQ ID NO: 8154 - RNA, 21 nt, synthetic construct
  source 1..21: mol_type = other RNA
gtttcattgatcacaaggcca

SEQ ID NO: 8155 - RNA, 21 nt, synthetic construct
  source 1..21: mol_type = other RNA
gttttcatttcacaaaaatgc

SEQ ID NO: 8156 - RNA, 21 nt, synthetic construct
  source 1..21: mol_type = other RNA
gttttggggactcatttcatt

SEQ ID NO: 8157 - RNA, 21 nt, synthetic construct
  source 1..21: mol_type = other RNA
gtttttcggcttatataagct

SEQ ID NO: 8158 - RNA, 21 nt, synthetic construct
  source 1..21: mol_type = other RNA
taaaaatcattgattgtcagc

SEQ ID NO: 8159 - RNA, 21 nt, synthetic construct
  source 1..21: mol_type = other RNA
taaaaggtgtccttttcaatc

SEQ ID NO: 8160 - RNA, 21 nt, synthetic construct
  source 1..21: mol_type = other RNA
taaacattaggtgagttgagg

SEQ ID NO: 8161 - RNA, 21 nt, synthetic construct
  source 1..21: mol_type = other RNA
taaagaggctgaaagaggcca

SEQ ID NO: 8162 - RNA, 21 nt, synthetic construct
  source 1..21: mol_type = other RNA
taaatactctcaggcactaag

SEQ ID NO: 8163 - RNA, 21 nt, synthetic construct
  source 1..21: mol_type = other RNA
taaatccaaaaggagctttca

SEQ ID NO: 8164 - RNA, 21 nt, synthetic construct
  source 1..21: mol_type = other RNA
taaatcctcaggtcacaacca

SEQ ID NO: 8165 - RNA, 21 nt, synthetic construct
  source 1..21: mol_type = other RNA
taaatgatcagcactggtaag

SEQ ID NO: 8166 - RNA, 21 nt, synthetic construct
  source 1..21: mol_type = other RNA
taaatgcatatcctgagccat

SEQ ID NO: 8167 - RNA, 21 nt, synthetic construct
  source 1..21: mol_type = other RNA
taacacagcatgtgtatttcc

SEQ ID NO: 8168 - RNA, 21 nt, synthetic construct
  source 1..21: mol_type = other RNA
taacagataagcaagagagat

SEQ ID NO: 8169 - RNA, 21 nt, synthetic construct
  source 1..21: mol_type = other RNA
taactcacctctcaaggtggg

SEQ ID NO: 8170 - RNA, 21 nt, synthetic construct
  source 1..21: mol_type = other RNA
taagaagacatgaaccaagtg

SEQ ID NO: 8171 - RNA, 21 nt, synthetic construct
  source 1..21: mol_type = other RNA
taagaagaccctcactgaata

SEQ ID NO: 8172 - RNA, 21 nt, synthetic construct
  source 1..21: mol_type = other RNA
taagaagggtggccttgtgat

SEQ ID NO: 8173 - RNA, 21 nt, synthetic construct
  source 1..21: mol_type = other RNA
taagagaagcactttgggatt

SEQ ID NO: 8174 - RNA, 21 nt, synthetic construct
  source 1..21: mol_type = other RNA
taagatgagtgtagaacacct

SEQ ID NO: 8175 - RNA, 21 nt, synthetic construct
  source 1..21: mol_type = other RNA
taagattgaacactgccccca

SEQ ID NO: 8176 - RNA, 21 nt, synthetic construct
  source 1..21: mol_type = other RNA
taagcaagagagatgttttgg

SEQ ID NO: 8177 - RNA, 21 nt, synthetic construct
  source 1..21: mol_type = other RNA
taagcactattagagttgatt

SEQ ID NO: 8178 - RNA, 21 nt, synthetic construct
  source 1..21: mol_type = other RNA
taagccgaaaaacgtctgaga

SEQ ID NO: 8179 - RNA, 21 nt, synthetic construct
  source 1..21: mol_type = other RNA
taagctaaagaggctgaaaga

SEQ ID NO: 8180 - RNA, 21 nt, synthetic construct
  source 1..21: mol_type = other RNA
taagctctaagagaagcactt

SEQ ID NO: 8181 - RNA, 21 nt, synthetic construct
  source 1..21: mol_type = other RNA
taagggatggaaaaggaagac

SEQ ID NO: 8182 - RNA, 21 nt, synthetic construct
  source 1..21: mol_type = other RNA
taagtatccccaggatctggt

SEQ ID NO: 8183 - RNA, 21 nt, synthetic construct
  source 1..21: mol_type = other RNA
taataagctaaagaggctgaa

SEQ ID NO: 8184 - RNA, 21 nt, synthetic construct
  source 1..21: mol_type = other RNA
taatggaaagaatcccaaagt

SEQ ID NO: 8185 - RNA, 21 nt, synthetic construct
  source 1..21: mol_type = other RNA
taatgtttatgagccagacaa

SEQ ID NO: 8186 - RNA, 21 nt, synthetic construct
  source 1..21: mol_type = other RNA
tacaaagtacagcccagtttc

SEQ ID NO: 8187 - RNA, 21 nt, synthetic construct
  source 1..21: mol_type = other RNA
tacaacattctcggtgcctgt

SEQ ID NO: 8188 - RNA, 21 nt, synthetic construct
  source 1..21: mol_type = other RNA
tacaattgcactggaaataca

SEQ ID NO: 8189 - RNA, 21 nt, synthetic construct
  source 1..21: mol_type = other RNA
tacacatgctgtgttaggaat

SEQ ID NO: 8190 - RNA, 21 nt, synthetic construct
  source 1..21: mol_type = other RNA
tacactcatcttagtgcctga

SEQ ID NO: 8191 - RNA, 21 nt, synthetic construct
  source 1..21: mol_type = other RNA
tacagacattttgaaccctgt

SEQ ID NO: 8192 - RNA, 21 nt, synthetic construct
  source 1..21: mol_type = other RNA
tacagcccagtttcattgatc

SEQ ID NO: 8193 - RNA, 21 nt, synthetic construct
  source 1..21: mol_type = other RNA
tacaggcaccgagaatgttgt

SEQ ID NO: 8194 - RNA, 21 nt, synthetic construct
  source 1..21: mol_type = other RNA
tacatattaggaaaatatggg

SEQ ID NO: 8195 - RNA, 21 nt, synthetic construct
  source 1..21: mol_type = other RNA
tacatgaggaactctaagtat

SEQ ID NO: 8196 - RNA, 21 nt, synthetic construct
  source 1..21: mol_type = other RNA
tacatgcatttgaggtcaagt

SEQ ID NO: 8197 - RNA, 21 nt, synthetic construct
  source 1..21: mol_type = other RNA
tacatggttgtgacctgagga

SEQ ID NO: 8198 - RNA, 21 nt, synthetic construct
  source 1..21: mol_type = other RNA
tacattctctctttagtcata

SEQ ID NO: 8199 - RNA, 21 nt, synthetic construct
  source 1..21: mol_type = other RNA
taccaggtgttctacactcat

SEQ ID NO: 8200 - RNA, 21 nt, synthetic construct
  source 1..21: mol_type = other RNA
taccagtgctgatcatttata

SEQ ID NO: 8201 - RNA, 21 nt, synthetic construct
  source 1..21: mol_type = other RNA
tacctcaagggggactgtctt

SEQ ID NO: 8202 - RNA, 21 nt, synthetic construct
  source 1..21: mol_type = other RNA
tacctgggggcagtgttcaat

SEQ ID NO: 8203 - RNA, 21 nt, synthetic construct
  source 1..21: mol_type = other RNA
tacgttgacatataaatgatc

SEQ ID NO: 8204 - RNA, 21 nt, synthetic construct
  source 1..21: mol_type = other RNA
tactctcaggcactaagatga

SEQ ID NO: 8205 - RNA, 21 nt, synthetic construct
  source 1..21: mol_type = other RNA
tactgcactactgggcagatg

SEQ ID NO: 8206 - RNA, 21 nt, synthetic construct
  source 1..21: mol_type = other RNA
tactgggcagatgtgggcccg

SEQ ID NO: 8207 - RNA, 21 nt, synthetic construct
  source 1..21: mol_type = other RNA
tacttagagttcctcatgtag

SEQ ID NO: 8208 - RNA, 21 nt, synthetic construct
  source 1..21: mol_type = other RNA
tacttcacaatatctacattc

SEQ ID NO: 8209 - RNA, 21 nt, synthetic construct
  source 1..21: mol_type = other RNA
tacttcactccagaaagcagg

SEQ ID NO: 8210 - RNA, 21 nt, synthetic construct
  source 1..21: mol_type = other RNA
tacttccggggtcaatcttgc

SEQ ID NO: 8211 - RNA, 21 nt, synthetic construct
  source 1..21: mol_type = other RNA
tacttgacctcaaatgcatgt

SEQ ID NO: 8212 - RNA, 21 nt, synthetic construct
  source 1..21: mol_type = other RNA
tagaacacctggtagctgctt

SEQ ID NO: 8213 - RNA, 21 nt, synthetic construct
  source 1..21: mol_type = other RNA
tagaactctgggctgccatgt

SEQ ID NO: 8214 - RNA, 21 nt, synthetic construct
  source 1..21: mol_type = other RNA
tagaagtgaagatgctgccag

SEQ ID NO: 8215 - RNA, 21 nt, synthetic construct
  source 1..21: mol_type = other RNA
tagaccttgtggctcaggggc

SEQ ID NO: 8216 - RNA, 21 nt, synthetic construct
  source 1..21: mol_type = other RNA
tagagcttatataagccgaaa

SEQ ID NO: 8217 - RNA, 21 nt, synthetic construct
  source 1..21: mol_type = other RNA
tagaggcttgcataataagct

SEQ ID NO: 8218 - RNA, 21 nt, synthetic construct
  source 1..21: mol_type = other RNA
tagagttcctcatgtagacct

SEQ ID NO: 8219 - RNA, 21 nt, synthetic construct
  source 1..21: mol_type = other RNA
tagagttgattgtcaggaagc

SEQ ID NO: 8220 - RNA, 21 nt, synthetic construct
  source 1..21: mol_type = other RNA
tagatgtgcatttttgtgaaa

SEQ ID NO: 8221 - RNA, 21 nt, synthetic construct
  source 1..21: mol_type = other RNA
tagcaaggcccaccttgagag

SEQ ID NO: 8222 - RNA, 21 nt, synthetic construct
  source 1..21: mol_type = other RNA
tagctcatcatcttcccctcc

SEQ ID NO: 8223 - RNA, 21 nt, synthetic construct
  source 1..21: mol_type = other RNA
tagctcctcaactcacctaat

SEQ ID NO: 8224 - RNA, 21 nt, synthetic construct
  source 1..21: mol_type = other RNA
tagctgacaatcaatgatttt

SEQ ID NO: 8225 - RNA, 21 nt, synthetic construct
  source 1..21: mol_type = other RNA
tagctgctgcgggcccacatc

SEQ ID NO: 8226 - RNA, 21 nt, synthetic construct
  source 1..21: mol_type = other RNA
tagctgctttttcatgcttct

SEQ ID NO: 8227 - RNA, 21 nt, synthetic construct
  source 1..21: mol_type = other RNA
tagcttattatgcaagcctct

SEQ ID NO: 8228 - RNA, 21 nt, synthetic construct
  source 1..21: mol_type = other RNA
taggaaaacatcattagtagc

SEQ ID NO: 8229 - RNA, 21 nt, synthetic construct
  source 1..21: mol_type = other RNA
taggaaaatatgggttgcatt

SEQ ID NO: 8230 - RNA, 21 nt, synthetic construct
  source 1..21: mol_type = other RNA
taggaatgaaatgagtcccca

SEQ ID NO: 8231 - RNA, 21 nt, synthetic construct
  source 1..21: mol_type = other RNA
taggcagattgaaaaggacac

SEQ ID NO: 8232 - RNA, 21 nt, synthetic construct
  source 1..21: mol_type = other RNA
taggtgagttgaggagctaca

SEQ ID NO: 8233 - RNA, 21 nt, synthetic construct
  source 1..21: mol_type = other RNA
taggtgtcttcccattccaga

SEQ ID NO: 8234 - RNA, 21 nt, synthetic construct
  source 1..21: mol_type = other RNA
tagtagctgacaatcaatgat

SEQ ID NO: 8235 - RNA, 21 nt, synthetic construct
  source 1..21: mol_type = other RNA
tagtcttccttttccatccct

SEQ ID NO: 8236 - RNA, 21 nt, synthetic construct
  source 1..21: mol_type = other RNA
tagtgcagtagctcatcatct

SEQ ID NO: 8237 - RNA, 21 nt, synthetic construct
  source 1..21: mol_type = other RNA
tagtgcctgagagtatttagg

SEQ ID NO: 8238 - RNA, 21 nt, synthetic construct
  source 1..21: mol_type = other RNA
tagtttcaccgatggctcagg

SEQ ID NO: 8239 - RNA, 21 nt, synthetic construct
  source 1..21: mol_type = other RNA
tataaatgatcagcactggta

SEQ ID NO: 8240 - RNA, 21 nt, synthetic construct
  source 1..21: mol_type = other RNA
tataagaagggtggccttgtg

SEQ ID NO: 8241 - RNA, 21 nt, synthetic construct
  source 1..21: mol_type = other RNA
tataagccgaaaaacgtctga

SEQ ID NO: 8242 - RNA, 21 nt, synthetic construct
  source 1..21: mol_type = other RNA
tataagctctaagagaagcac

SEQ ID NO: 8243 - RNA, 21 nt, synthetic construct
  source 1..21: mol_type = other RNA
tatacaaagtacagcccagtt

SEQ ID NO: 8244 - RNA, 21 nt, synthetic construct
  source 1..21: mol_type = other RNA
tatacttcactccagaaagca

SEQ ID NO: 8245 - RNA, 21 nt, synthetic construct
  source 1..21: mol_type = other RNA
tatacttccggggtcaatctt

SEQ ID NO: 8246 - RNA, 21 nt, synthetic construct
  source 1..21: mol_type = other RNA
tatataagccgaaaaacgtct

SEQ ID NO: 8247 - RNA, 21 nt, synthetic construct
  source 1..21: mol_type = other RNA
tatataagctctaagagaagc

SEQ ID NO: 8248 - RNA, 21 nt, synthetic construct
  source 1..21: mol_type = other RNA
tatatgtcaacgtatctgagc

SEQ ID NO: 8249 - RNA, 21 nt, synthetic construct
  source 1..21: mol_type = other RNA
tatattccaaagtatacttcc

SEQ ID NO: 8250 - RNA, 21 nt, synthetic construct
  source 1..21: mol_type = other RNA
tatccccaggatctggtgatg

SEQ ID NO: 8251 - RNA, 21 nt, synthetic construct
  source 1..21: mol_type = other RNA
tatcctgagccatcggtgaaa

SEQ ID NO: 8252 - RNA, 21 nt, synthetic construct
  source 1..21: mol_type = other RNA
tatctacattctctctttagt

SEQ ID NO: 8253 - RNA, 21 nt, synthetic construct
  source 1..21: mol_type = other RNA
tatctgaaagacagtccccct

SEQ ID NO: 8254 - RNA, 21 nt, synthetic construct
  source 1..21: mol_type = other RNA
tatctgagctctctctggtca

SEQ ID NO: 8255 - RNA, 21 nt, synthetic construct
  source 1..21: mol_type = other RNA
tatctgttagtttcaccgatg

SEQ ID NO: 8256 - RNA, 21 nt, synthetic construct
  source 1..21: mol_type = other RNA
tatgacggaagaacatagaac

SEQ ID NO: 8257 - RNA, 21 nt, synthetic construct
  source 1..21: mol_type = other RNA
tatgactaaagagagaatgta

SEQ ID NO: 8258 - RNA, 21 nt, synthetic construct
  source 1..21: mol_type = other RNA
tatgagccagacaaatggagg

SEQ ID NO: 8259 - RNA, 21 nt, synthetic construct
  source 1..21: mol_type = other RNA
tatgattctttgttacaggca

SEQ ID NO: 8260 - RNA, 21 nt, synthetic construct
  source 1..21: mol_type = other RNA
tatgcaagcctctagtcttcc

SEQ ID NO: 8261 - RNA, 21 nt, synthetic construct
  source 1..21: mol_type = other RNA
tatgcatttagaagtgaagat

SEQ ID NO: 8262 - RNA, 21 nt, synthetic construct
  source 1..21: mol_type = other RNA
tatggaattgtcctgctttct

SEQ ID NO: 8263 - RNA, 21 nt, synthetic construct
  source 1..21: mol_type = other RNA
tatgggttgcatttggtcaag

SEQ ID NO: 8264 - RNA, 21 nt, synthetic construct
  source 1..21: mol_type = other RNA
tatgtacttcacaatatctac

SEQ ID NO: 8265 - RNA, 21 nt, synthetic construct
  source 1..21: mol_type = other RNA
tatgtagatgtgcatttttgt

SEQ ID NO: 8266 - RNA, 21 nt, synthetic construct
  source 1..21: mol_type = other RNA
tatgtcaacgtatctgagctc

SEQ ID NO: 8267 - RNA, 21 nt, synthetic construct
  source 1..21: mol_type = other RNA
tatgttcttccgtcatattcc

SEQ ID NO: 8268 - RNA, 21 nt, synthetic construct
  source 1..21: mol_type = other RNA
tattagagttgattgtcagga

SEQ ID NO: 8269 - RNA, 21 nt, synthetic construct
  source 1..21: mol_type = other RNA
tattaggaaaatatgggttgc

SEQ ID NO: 8270 - RNA, 21 nt, synthetic construct
  source 1..21: mol_type = other RNA
tattatgcaagcctctagtct

SEQ ID NO: 8271 - RNA, 21 nt, synthetic construct
  source 1..21: mol_type = other RNA
tattcagtgagggtcttctta

SEQ ID NO: 8272 - RNA, 21 nt, synthetic construct
  source 1..21: mol_type = other RNA
tattccaaagtatacttccgg

SEQ ID NO: 8273 - RNA, 21 nt, synthetic construct
  source 1..21: mol_type = other RNA
tattcctccatttgtctggct

SEQ ID NO: 8274 - RNA, 21 nt, synthetic construct
  source 1..21: mol_type = other RNA
tattccttgttgaaagctcct

SEQ ID NO: 8275 - RNA, 21 nt, synthetic construct
  source 1..21: mol_type = other RNA
tattgtgaagtacatattagg

SEQ ID NO: 8276 - RNA, 21 nt, synthetic construct
  source 1..21: mol_type = other RNA
tatttaggcagattgaaaagg

SEQ ID NO: 8277 - RNA, 21 nt, synthetic construct
  source 1..21: mol_type = other RNA
tatttcaggcaagtccaactc

SEQ ID NO: 8278 - RNA, 21 nt, synthetic construct
  source 1..21: mol_type = other RNA
tatttccagtgcaattgtagg

SEQ ID NO: 8279 - RNA, 21 nt, synthetic construct
  source 1..21: mol_type = other RNA
tcaaaatcttgaccaaatgca

SEQ ID NO: 8280 - RNA, 21 nt, synthetic construct
  source 1..21: mol_type = other RNA
tcaaaatgtctgtagctcctc

SEQ ID NO: 8281 - RNA, 21 nt, synthetic construct
  source 1..21: mol_type = other RNA
tcaaaattgaccagagagagc

SEQ ID NO: 8282 - RNA, 21 nt, synthetic construct
  source 1..21: mol_type = other RNA
tcaaatgcatgtaagaagacc

SEQ ID NO: 8283 - RNA, 21 nt, synthetic construct
  source 1..21: mol_type = other RNA
tcaacgtatctgagctctctc

SEQ ID NO: 8284 - RNA, 21 nt, synthetic construct
  source 1..21: mol_type = other RNA
tcaactcacctaatgtttatg

SEQ ID NO: 8285 - RNA, 21 nt, synthetic construct
  source 1..21: mol_type = other RNA
tcaactctaatagtgcttaaa

SEQ ID NO: 8286 - RNA, 21 nt, synthetic construct
  source 1..21: mol_type = other RNA
tcaagattttgaatgcttcct

SEQ ID NO: 8287 - RNA, 21 nt, synthetic construct
  source 1..21: mol_type = other RNA
tcaagggggactgtctttcag

SEQ ID NO: 8288 - RNA, 21 nt, synthetic construct
  source 1..21: mol_type = other RNA
tcaaggtccacttggttcatg

SEQ ID NO: 8289 - RNA, 21 nt, synthetic construct
  source 1..21: mol_type = other RNA
tcaaggtccatgcctctggaa

SEQ ID NO: 8290 - RNA, 21 nt, synthetic construct
  source 1..21: mol_type = other RNA
tcaaggtgggccttgctacct

SEQ ID NO: 8291 - RNA, 21 nt, synthetic construct
  source 1..21: mol_type = other RNA
tcaagtaagaagacatgaacc

SEQ ID NO: 8292 - RNA, 21 nt, synthetic construct
  source 1..21: mol_type = other RNA
tcaatctgcctaaatactctc

SEQ ID NO: 8293 - RNA, 21 nt, synthetic construct
  source 1..21: mol_type = other RNA
tcaatcttaccagtgctgatc

SEQ ID NO: 8294 - RNA, 21 nt, synthetic construct
  source 1..21: mol_type = other RNA
tcaatcttgcaacaacctgcc

SEQ ID NO: 8295 - RNA, 21 nt, synthetic construct
  source 1..21: mol_type = other RNA
tcaatgaaactgggctgtact

SEQ ID NO: 8296 - RNA, 21 nt, synthetic construct
  source 1..21: mol_type = other RNA
tcaattttgaggaatctcaga

SEQ ID NO: 8297 - RNA, 21 nt, synthetic construct
  source 1..21: mol_type = other RNA
tcacaaaaatgcacatctaca

SEQ ID NO: 8298 - RNA, 21 nt, synthetic construct
  source 1..21: mol_type = other RNA
tcacaaccatgtatctgaaag

SEQ ID NO: 8299 - RNA, 21 nt, synthetic construct
  source 1..21: mol_type = other RNA
tcacaaggccacccttcttat

SEQ ID NO: 8300 - RNA, 21 nt, synthetic construct
  source 1..21: mol_type = other RNA
tcacaatatctacattctctc

SEQ ID NO: 8301 - RNA, 21 nt, synthetic construct
  source 1..21: mol_type = other RNA
tcacatggcagcccagagttc

SEQ ID NO: 8302 - RNA, 21 nt, synthetic construct
  source 1..21: mol_type = other RNA
tcaccagatcctggggatact

SEQ ID NO: 8303 - RNA, 21 nt, synthetic construct
  source 1..21: mol_type = other RNA
tcaccgatggctcaggatatg

SEQ ID NO: 8304 - RNA, 21 nt, synthetic construct
  source 1..21: mol_type = other RNA
tcacctaatgtttatgagcca

SEQ ID NO: 8305 - RNA, 21 nt, synthetic construct
  source 1..21: mol_type = other RNA
tcacctctcaaggtgggcctt

SEQ ID NO: 8306 - RNA, 21 nt, synthetic construct
  source 1..21: mol_type = other RNA
tcactccagaaagcaggacaa

SEQ ID NO: 8307 - RNA, 21 nt, synthetic construct
  source 1..21: mol_type = other RNA
tcactgaatacaacattctcg

SEQ ID NO: 8308 - RNA, 21 nt, synthetic construct
  source 1..21: mol_type = other RNA
tcacttctaaatgcatatcct

SEQ ID NO: 8309 - RNA, 21 nt, synthetic construct
  source 1..21: mol_type = other RNA
tcagacgtttttcggcttata

SEQ ID NO: 8310 - RNA, 21 nt, synthetic construct
  source 1..21: mol_type = other RNA
tcagatacatggttgtgacct

SEQ ID NO: 8311 - RNA, 21 nt, synthetic construct
  source 1..21: mol_type = other RNA
tcagatacgttgacatataaa

SEQ ID NO: 8312 - RNA, 21 nt, synthetic construct
  source 1..21: mol_type = other RNA
tcagcactggtaagattgaac

SEQ ID NO: 8313 - RNA, 21 nt, synthetic construct
  source 1..21: mol_type = other RNA
tcagcctctttagcttattat

SEQ ID NO: 8314 - RNA, 21 nt, synthetic construct
  source 1..21: mol_type = other RNA
tcagctactaatgatgttttc

SEQ ID NO: 8315 - RNA, 21 nt, synthetic construct
  source 1..21: mol_type = other RNA
tcaggaagcattcaaaatctt

SEQ ID NO: 8316 - RNA, 21 nt, synthetic construct
  source 1..21: mol_type = other RNA
tcaggatatgcatttagaagt

SEQ ID NO: 8317 - RNA, 21 nt, synthetic construct
  source 1..21: mol_type = other RNA
tcaggcaagtccaactcaagg

SEQ ID NO: 8318 - RNA, 21 nt, synthetic construct
  source 1..21: mol_type = other RNA
tcaggcactaagatgagtgta

SEQ ID NO: 8319 - RNA, 21 nt, synthetic construct
  source 1..21: mol_type = other RNA
tcaggggcaggttgttgcaag

SEQ ID NO: 8320 - RNA, 21 nt, synthetic construct
  source 1..21: mol_type = other RNA
tcaggtcacaaccatgtatct

SEQ ID NO: 8321 - RNA, 21 nt, synthetic construct
  source 1..21: mol_type = other RNA
tcagtgagggtcttcttacat

SEQ ID NO: 8322 - RNA, 21 nt, synthetic construct
  source 1..21: mol_type = other RNA
tcataaacattaggtgagttg

SEQ ID NO: 8323 - RNA, 21 nt, synthetic construct
  source 1..21: mol_type = other RNA
tcataatggaaagaatcccaa

SEQ ID NO: 8324 - RNA, 21 nt, synthetic construct
  source 1..21: mol_type = other RNA
tcatattcctccatttgtctg

SEQ ID NO: 8325 - RNA, 21 nt, synthetic construct
  source 1..21: mol_type = other RNA
tcatcaccagatcctggggat

SEQ ID NO: 8326 - RNA, 21 nt, synthetic construct
  source 1..21: mol_type = other RNA
tcatcatcttcccctccatca

SEQ ID NO: 8327 - RNA, 21 nt, synthetic construct
  source 1..21: mol_type = other RNA
tcatcttagtgcctgagagta

SEQ ID NO: 8328 - RNA, 21 nt, synthetic construct
  source 1..21: mol_type = other RNA
tcatcttcccctccatcatca

SEQ ID NO: 8329 - RNA, 21 nt, synthetic construct
  source 1..21: mol_type = other RNA
tcatgcttctccctcttcaca

SEQ ID NO: 8330 - RNA, 21 nt, synthetic construct
  source 1..21: mol_type = other RNA
tcatgtagaccttgtggctca

SEQ ID NO: 8331 - RNA, 21 nt, synthetic construct
  source 1..21: mol_type = other RNA
tcatgtcttcttacttgacct

SEQ ID NO: 8332 - RNA, 21 nt, synthetic construct
  source 1..21: mol_type = other RNA
tcattagtagctgacaatcaa

SEQ ID NO: 8333 - RNA, 21 nt, synthetic construct
  source 1..21: mol_type = other RNA
tcattcctaacacagcatgtg

SEQ ID NO: 8334 - RNA, 21 nt, synthetic construct
  source 1..21: mol_type = other RNA
tcattgatcacaaggccaccc

SEQ ID NO: 8335 - RNA, 21 nt, synthetic construct
  source 1..21: mol_type = other RNA
tcattgattgtcagctactaa

SEQ ID NO: 8336 - RNA, 21 nt, synthetic construct
  source 1..21: mol_type = other RNA
tcatttatatgtcaacgtatc

SEQ ID NO: 8337 - RNA, 21 nt, synthetic construct
  source 1..21: mol_type = other RNA
tcatttcacaaaaatgcacat

SEQ ID NO: 8338 - RNA, 21 nt, synthetic construct
  source 1..21: mol_type = other RNA
tcatttcattcctaacacagc

SEQ ID NO: 8339 - RNA, 21 nt, synthetic construct
  source 1..21: mol_type = other RNA
tccaaaaggagctttcaacaa

SEQ ID NO: 8340 - RNA, 21 nt, synthetic construct
  source 1..21: mol_type = other RNA
tccaaagtatacttccggggt

SEQ ID NO: 8341 - RNA, 21 nt, synthetic construct
  source 1..21: mol_type = other RNA
tccaactcaaggtccatgcct

SEQ ID NO: 8342 - RNA, 21 nt, synthetic construct
  source 1..21: mol_type = other RNA
tccacttggttcatgtcttct

SEQ ID NO: 8343 - RNA, 21 nt, synthetic construct
  source 1..21: mol_type = other RNA
tccagaaagcaggacaattcc

SEQ ID NO: 8344 - RNA, 21 nt, synthetic construct
  source 1..21: mol_type = other RNA
tccagaggcatggaccttgag

SEQ ID NO: 8345 - RNA, 21 nt, synthetic construct
  source 1..21: mol_type = other RNA
tccagtgcaattgtaggggtg

SEQ ID NO: 8346 - RNA, 21 nt, synthetic construct
  source 1..21: mol_type = other RNA
tccataggtgtcttcccattc

SEQ ID NO: 8347 - RNA, 21 nt, synthetic construct
  source 1..21: mol_type = other RNA
tccatcatcaccagatcctgg

SEQ ID NO: 8348 - RNA, 21 nt, synthetic construct
  source 1..21: mol_type = other RNA
tccatcccttaaatcctcagg

SEQ ID NO: 8349 - RNA, 21 nt, synthetic construct
  source 1..21: mol_type = other RNA
tccatgcctctggaatgggaa

SEQ ID NO: 8350 - RNA, 21 nt, synthetic construct
  source 1..21: mol_type = other RNA
tccattatgattctttgttac

SEQ ID NO: 8351 - RNA, 21 nt, synthetic construct
  source 1..21: mol_type = other RNA
tccatttgtctggctcataaa

SEQ ID NO: 8352 - RNA, 21 nt, synthetic construct
  source 1..21: mol_type = other RNA
tcccaaagtgcttctcttaga

SEQ ID NO: 8353 - RNA, 21 nt, synthetic construct
  source 1..21: mol_type = other RNA
tcccattccagaggcatggac

SEQ ID NO: 8354 - RNA, 21 nt, synthetic construct
  source 1..21: mol_type = other RNA
tccccaaaacatctctcttgc

SEQ ID NO: 8355 - RNA, 21 nt, synthetic construct
  source 1..21: mol_type = other RNA
tccccaggatctggtgatgat

SEQ ID NO: 8356 - RNA, 21 nt, synthetic construct
  source 1..21: mol_type = other RNA
tcccccttgaggtagcaaggc

SEQ ID NO: 8357 - RNA, 21 nt, synthetic construct
  source 1..21: mol_type = other RNA
tcccctccatcatcaccagat

SEQ ID NO: 8358 - RNA, 21 nt, synthetic construct
  source 1..21: mol_type = other RNA
tccctcttcacatggcagccc

SEQ ID NO: 8359 - RNA, 21 nt, synthetic construct
  source 1..21: mol_type = other RNA
tcccttaaatcctcaggtcac

SEQ ID NO: 8360 - RNA, 21 nt, synthetic construct
  source 1..21: mol_type = other RNA
tccggggtcaatcttgcaaca

SEQ ID NO: 8361 - RNA, 21 nt, synthetic construct
  source 1..21: mol_type = other RNA
tccgtcatattcctccatttg

SEQ ID NO: 8362 - RNA, 21 nt, synthetic construct
  source 1..21: mol_type = other RNA
tcctaacacagcatgtgtatt

SEQ ID NO: 8363 - RNA, 21 nt, synthetic construct
  source 1..21: mol_type = other RNA
tcctaatatgtacttcacaat

SEQ ID NO: 8364 - RNA, 21 nt, synthetic construct
  source 1..21: mol_type = other RNA
tcctcaaaattgaccagagag

SEQ ID NO: 8365 - RNA, 21 nt, synthetic construct
  source 1..21: mol_type = other RNA
tcctcaactcacctaatgttt

SEQ ID NO: 8366 - RNA, 21 nt, synthetic construct
  source 1..21: mol_type = other RNA
tcctcaggtcacaaccatgta

SEQ ID NO: 8367 - RNA, 21 nt, synthetic construct
  source 1..21: mol_type = other RNA
tcctcatgtagaccttgtggc

SEQ ID NO: 8368 - RNA, 21 nt, synthetic construct
  source 1..21: mol_type = other RNA
tcctccatttgtctggctcat

SEQ ID NO: 8369 - RNA, 21 nt, synthetic construct
  source 1..21: mol_type = other RNA
tcctgacaatcaactctaata

SEQ ID NO: 8370 - RNA, 21 nt, synthetic construct
  source 1..21: mol_type = other RNA
tcctgagccatcggtgaaact

SEQ ID NO: 8371 - RNA, 21 nt, synthetic construct
  source 1..21: mol_type = other RNA
tcctgctttctggagtgaagt

SEQ ID NO: 8372 - RNA, 21 nt, synthetic construct
  source 1..21: mol_type = other RNA
tcctggggatacttagagttc

SEQ ID NO: 8373 - RNA, 21 nt, synthetic construct
  source 1..21: mol_type = other RNA
tccttgttgaaagctcctttt

SEQ ID NO: 8374 - RNA, 21 nt, synthetic construct
  source 1..21: mol_type = other RNA
tccttttcaatctgcctaaat

SEQ ID NO: 8375 - RNA, 21 nt, synthetic construct
  source 1..21: mol_type = other RNA
tccttttccatcccttaaatc

SEQ ID NO: 8376 - RNA, 21 nt, synthetic construct
  source 1..21: mol_type = other RNA
tccttttggatttatttcagg

SEQ ID NO: 8377 - RNA, 21 nt, synthetic construct
  source 1..21: mol_type = other RNA
tcggcttatataagctctaag

SEQ ID NO: 8378 - RNA, 21 nt, synthetic construct
  source 1..21: mol_type = other RNA
tcggtgaaactaacagataag

SEQ ID NO: 8379 - RNA, 21 nt, synthetic construct
  source 1..21: mol_type = other RNA
tcggtgcctgtaacaaagaat

SEQ ID NO: 8380 - RNA, 21 nt, synthetic construct
  source 1..21: mol_type = other RNA
tctaaatgcatatcctgagcc

SEQ ID NO: 8381 - RNA, 21 nt, synthetic construct
  source 1..21: mol_type = other RNA
tctaagagaagcactttggga

SEQ ID NO: 8382 - RNA, 21 nt, synthetic construct
  source 1..21: mol_type = other RNA
tctaagtatccccaggatctg

SEQ ID NO: 8383 - RNA, 21 nt, synthetic construct
  source 1..21: mol_type = other RNA
tctacactcatcttagtgcct

SEQ ID NO: 8384 - RNA, 21 nt, synthetic construct
  source 1..21: mol_type = other RNA
tctacatgaggaactctaagt

SEQ ID NO: 8385 - RNA, 21 nt, synthetic construct
  source 1..21: mol_type = other RNA
tctacattctctctttagtca

SEQ ID NO: 8386 - RNA, 21 nt, synthetic construct
  source 1..21: mol_type = other RNA
tctagtcttccttttccatcc

SEQ ID NO: 8387 - RNA, 21 nt, synthetic construct
  source 1..21: mol_type = other RNA
tctatgttcttccgtcatatt

SEQ ID NO: 8388 - RNA, 21 nt, synthetic construct
  source 1..21: mol_type = other RNA
tctcaaggtccacttggttca

SEQ ID NO: 8389 - RNA, 21 nt, synthetic construct
  source 1..21: mol_type = other RNA
tctcaaggtgggccttgctac

SEQ ID NO: 8390 - RNA, 21 nt, synthetic construct
  source 1..21: mol_type = other RNA
tctcagacgtttttcggctta

SEQ ID NO: 8391 - RNA, 21 nt, synthetic construct
  source 1..21: mol_type = other RNA
tctcaggcactaagatgagtg

SEQ ID NO: 8392 - RNA, 21 nt, synthetic construct
  source 1..21: mol_type = other RNA
tctccctcttcacatggcagc

SEQ ID NO: 8393 - RNA, 21 nt, synthetic construct
  source 1..21: mol_type = other RNA
tctcggtgcctgtaacaaaga

SEQ ID NO: 8394 - RNA, 21 nt, synthetic construct
  source 1..21: mol_type = other RNA
tctctctggtcaattttgagg

SEQ ID NO: 8395 - RNA, 21 nt, synthetic construct
  source 1..21: mol_type = other RNA
tctctcttgcttatctgttag

SEQ ID NO: 8396 - RNA, 21 nt, synthetic construct
  source 1..21: mol_type = other RNA
tctctctttagtcatacacac

SEQ ID NO: 8397 - RNA, 21 nt, synthetic construct
  source 1..21: mol_type = other RNA
tctctggtcaattttgaggaa

SEQ ID NO: 8398 - RNA, 21 nt, synthetic construct
  source 1..21: mol_type = other RNA
tctcttagagcttatataagc

SEQ ID NO: 8399 - RNA, 21 nt, synthetic construct
  source 1..21: mol_type = other RNA
tctcttgcttatctgttagtt

SEQ ID NO: 8400 - RNA, 21 nt, synthetic construct
  source 1..21: mol_type = other RNA
tctctttagtcatacacacac

SEQ ID NO: 8401 - RNA, 21 nt, synthetic construct
  source 1..21: mol_type = other RNA
tctgaaagacagtcccccttg

SEQ ID NO: 8402 - RNA, 21 nt, synthetic construct
  source 1..21: mol_type = other RNA
tctgagattcctcaaaattga

SEQ ID NO: 8403 - RNA, 21 nt, synthetic construct
  source 1..21: mol_type = other RNA
tctgagctctctctggtcaat

SEQ ID NO: 8404 - RNA, 21 nt, synthetic construct
  source 1..21: mol_type = other RNA
tctgcccagtagtgcagtagc

SEQ ID NO: 8405 - RNA, 21 nt, synthetic construct
  source 1..21: mol_type = other RNA
tctgcctaaatactctcaggc

SEQ ID NO: 8406 - RNA, 21 nt, synthetic construct
  source 1..21: mol_type = other RNA
tctggaatgggaagacaccta

SEQ ID NO: 8407 - RNA, 21 nt, synthetic construct
  source 1..21: mol_type = other RNA
tctggagtgaagtataagaag

SEQ ID NO: 8408 - RNA, 21 nt, synthetic construct
  source 1..21: mol_type = other RNA
tctggctcataaacattaggt

SEQ ID NO: 8409 - RNA, 21 nt, synthetic construct
  source 1..21: mol_type = other RNA
tctgggctgccatgtgaagag

SEQ ID NO: 8410 - RNA, 21 nt, synthetic construct
  source 1..21: mol_type = other RNA
tctggtcaattttgaggaatc

SEQ ID NO: 8411 - RNA, 21 nt, synthetic construct
  source 1..21: mol_type = other RNA
tctggtgatgatggaggggaa

SEQ ID NO: 8412 - RNA, 21 nt, synthetic construct
  source 1..21: mol_type = other RNA
tctgtagctcctcaactcacc

SEQ ID NO: 8413 - RNA, 21 nt, synthetic construct
  source 1..21: mol_type = other RNA
tctgttagtttcaccgatggc

SEQ ID NO: 8414 - RNA, 21 nt, synthetic construct
  source 1..21: mol_type = other RNA
tcttacatgcatttgaggtca

SEQ ID NO: 8415 - RNA, 21 nt, synthetic construct
  source 1..21: mol_type = other RNA
tcttaccagtgctgatcattt

SEQ ID NO: 8416 - RNA, 21 nt, synthetic construct
  source 1..21: mol_type = other RNA
tcttacttgacctcaaatgca

SEQ ID NO: 8417 - RNA, 21 nt, synthetic construct
  source 1..21: mol_type = other RNA
tcttagagcttatataagccg

SEQ ID NO: 8418 - RNA, 21 nt, synthetic construct
  source 1..21: mol_type = other RNA
tcttagtgcctgagagtattt

SEQ ID NO: 8419 - RNA, 21 nt, synthetic construct
  source 1..21: mol_type = other RNA
tcttatacttcactccagaaa

SEQ ID NO: 8420 - RNA, 21 nt, synthetic construct
  source 1..21: mol_type = other RNA
tcttcacatggcagcccagag

SEQ ID NO: 8421 - RNA, 21 nt, synthetic construct
  source 1..21: mol_type = other RNA
tcttcacttctaaatgcatat

SEQ ID NO: 8422 - RNA, 21 nt, synthetic construct
  source 1..21: mol_type = other RNA
tcttcccattccagaggcatg

SEQ ID NO: 8423 - RNA, 21 nt, synthetic construct
  source 1..21: mol_type = other RNA
tcttcccctccatcatcacca

SEQ ID NO: 8424 - RNA, 21 nt, synthetic construct
  source 1..21: mol_type = other RNA
tcttccgtcatattcctccat

SEQ ID NO: 8425 - RNA, 21 nt, synthetic construct
  source 1..21: mol_type = other RNA
tcttccttttccatcccttaa

SEQ ID NO: 8426 - RNA, 21 nt, synthetic construct
  source 1..21: mol_type = other RNA
tcttcttacatgcatttgagg

SEQ ID NO: 8427 - RNA, 21 nt, synthetic construct
  source 1..21: mol_type = other RNA
tcttcttacttgacctcaaat

SEQ ID NO: 8428 - RNA, 21 nt, synthetic construct
  source 1..21: mol_type = other RNA
tcttgaccaaatgcaacccat

SEQ ID NO: 8429 - RNA, 21 nt, synthetic construct
  source 1..21: mol_type = other RNA
tcttgcaacaacctgcccctg

SEQ ID NO: 8430 - RNA, 21 nt, synthetic construct
  source 1..21: mol_type = other RNA
tcttgcttatctgttagtttc

SEQ ID NO: 8431 - RNA, 21 nt, synthetic construct
  source 1..21: mol_type = other RNA
tctttagcttattatgcaagc

SEQ ID NO: 8432 - RNA, 21 nt, synthetic construct
  source 1..21: mol_type = other RNA
tctttagtcatacacacacac

SEQ ID NO: 8433 - RNA, 21 nt, synthetic construct
  source 1..21: mol_type = other RNA
tctttcagatacatggttgtg

SEQ ID NO: 8434 - RNA, 21 nt, synthetic construct
  source 1..21: mol_type = other RNA
tctttcagcctctttagctta

SEQ ID NO: 8435 - RNA, 21 nt, synthetic construct
  source 1..21: mol_type = other RNA
tctttccattatgattctttg

SEQ ID NO: 8436 - RNA, 21 nt, synthetic construct
  source 1..21: mol_type = other RNA
tctttgttacaggcaccgaga

SEQ ID NO: 8437 - RNA, 21 nt, synthetic construct
  source 1..21: mol_type = other RNA
tgaaaaagcagctaccaggtg

SEQ ID NO: 8438 - RNA, 21 nt, synthetic construct
  source 1..21: mol_type = other RNA
tgaaaaggacaccttttaact

SEQ ID NO: 8439 - RNA, 21 nt, synthetic construct
  source 1..21: mol_type = other RNA
tgaaactaacagataagcaag

SEQ ID NO: 8440 - RNA, 21 nt, synthetic construct
  source 1..21: mol_type = other RNA
tgaaactgggctgtactttgt

SEQ ID NO: 8441 - RNA, 21 nt, synthetic construct
  source 1..21: mol_type = other RNA
tgaaagacagtcccccttgag

SEQ ID NO: 8442 - RNA, 21 nt, synthetic construct
  source 1..21: mol_type = other RNA
tgaaagaggccaatgccccac

SEQ ID NO: 8443 - RNA, 21 nt, synthetic construct
  source 1..21: mol_type = other RNA
tgaaagctccttttggattta

SEQ ID NO: 8444 - RNA, 21 nt, synthetic construct
  source 1..21: mol_type = other RNA
tgaaataaatccaaaaggagc

SEQ ID NO: 8445 - RNA, 21 nt, synthetic construct
  source 1..21: mol_type = other RNA
tgaaatgagtccccaaaacat

SEQ ID NO: 8446 - RNA, 21 nt, synthetic construct
  source 1..21: mol_type = other RNA
tgaacactgcccccaggtagc

SEQ ID NO: 8447 - RNA, 21 nt, synthetic construct
  source 1..21: mol_type = other RNA
tgaaccaagtggaccttgaga

SEQ ID NO: 8448 - RNA, 21 nt, synthetic construct
  source 1..21: mol_type = other RNA
tgaaccctgtggtctcaaggt

SEQ ID NO: 8449 - RNA, 21 nt, synthetic construct
  source 1..21: mol_type = other RNA
tgaagagggagaagcatgaaa

SEQ ID NO: 8450 - RNA, 21 nt, synthetic construct
  source 1..21: mol_type = other RNA
tgaagatgctgccagtggggc

SEQ ID NO: 8451 - RNA, 21 nt, synthetic construct
  source 1..21: mol_type = other RNA
tgaagtataagaagggtggcc

SEQ ID NO: 8452 - RNA, 21 nt, synthetic construct
  source 1..21: mol_type = other RNA
tgaatacaacattctcggtgc

SEQ ID NO: 8453 - RNA, 21 nt, synthetic construct
  source 1..21: mol_type = other RNA
tgaatgcttcctgacaatcaa

SEQ ID NO: 8454 - RNA, 21 nt, synthetic construct
  source 1..21: mol_type = other RNA
tgacaatcaactctaatagtg

SEQ ID NO: 8455 - RNA, 21 nt, synthetic construct
  source 1..21: mol_type = other RNA
tgacatataaatgatcagcac

SEQ ID NO: 8456 - RNA, 21 nt, synthetic construct
  source 1..21: mol_type = other RNA
tgaccaaatgcaacccatatt

SEQ ID NO: 8457 - RNA, 21 nt, synthetic construct
  source 1..21: mol_type = other RNA
tgaccagagagagctcagata

SEQ ID NO: 8458 - RNA, 21 nt, synthetic construct
  source 1..21: mol_type = other RNA
tgaccccggaagtatactttg

SEQ ID NO: 8459 - RNA, 21 nt, synthetic construct
  source 1..21: mol_type = other RNA
tgacctcaaatgcatgtaaga

SEQ ID NO: 8460 - RNA, 21 nt, synthetic construct
  source 1..21: mol_type = other RNA
tgacctgaggatttaagggat

SEQ ID NO: 8461 - RNA, 21 nt, synthetic construct
  source 1..21: mol_type = other RNA
tgacggaagaacatagaactc

SEQ ID NO: 8462 - RNA, 21 nt, synthetic construct
  source 1..21: mol_type = other RNA
tgactaaagagagaatgtaga

SEQ ID NO: 8463 - RNA, 21 nt, synthetic construct
  source 1..21: mol_type = other RNA
tgactattccttgttgaaagc

SEQ ID NO: 8464 - RNA, 21 nt, synthetic construct
  source 1..21: mol_type = other RNA
tgagaccacagggttcaaaat

SEQ ID NO: 8465 - RNA, 21 nt, synthetic construct
  source 1..21: mol_type = other RNA
tgagaggtgagttaaaaggtg

SEQ ID NO: 8466 - RNA, 21 nt, synthetic construct
  source 1..21: mol_type = other RNA
tgagagtatttaggcagattg

SEQ ID NO: 8467 - RNA, 21 nt, synthetic construct
  source 1..21: mol_type = other RNA
tgagattcctcaaaattgacc

SEQ ID NO: 8468 - RNA, 21 nt, synthetic construct
  source 1..21: mol_type = other RNA
tgagccacaaggtctacatga

SEQ ID NO: 8469 - RNA, 21 nt, synthetic construct
  source 1..21: mol_type = other RNA
tgagccagacaaatggaggaa

SEQ ID NO: 8470 - RNA, 21 nt, synthetic construct
  source 1..21: mol_type = other RNA
tgagccatcggtgaaactaac

SEQ ID NO: 8471 - RNA, 21 nt, synthetic construct
  source 1..21: mol_type = other RNA
tgagctactgcactactgggc

SEQ ID NO: 8472 - RNA, 21 nt, synthetic construct
  source 1..21: mol_type = other RNA
tgagctctctctggtcaattt

SEQ ID NO: 8473 - RNA, 21 nt, synthetic construct
  source 1..21: mol_type = other RNA
tgaggaactctaagtatcccc

SEQ ID NO: 8474 - RNA, 21 nt, synthetic construct
  source 1..21: mol_type = other RNA
tgaggaatctcagacgttttt

SEQ ID NO: 8475 - RNA, 21 nt, synthetic construct
  source 1..21: mol_type = other RNA
tgaggagctacagacattttg

SEQ ID NO: 8476 - RNA, 21 nt, synthetic construct
  source 1..21: mol_type = other RNA
tgaggatttaagggatggaaa

SEQ ID NO: 8477 - RNA, 21 nt, synthetic construct
  source 1..21: mol_type = other RNA
tgagggtcttcttacatgcat

SEQ ID NO: 8478 - RNA, 21 nt, synthetic construct
  source 1..21: mol_type = other RNA
tgaggtagcaaggcccacctt

SEQ ID NO: 8479 - RNA, 21 nt, synthetic construct
  source 1..21: mol_type = other RNA
tgaggtcaagtaagaagacat

SEQ ID NO: 8480 - RNA, 21 nt, synthetic construct
  source 1..21: mol_type = other RNA
tgagtccccaaaacatctctc

SEQ ID NO: 8481 - RNA, 21 nt, synthetic construct
  source 1..21: mol_type = other RNA
tgagtgtagaacacctggtag

SEQ ID NO: 8482 - RNA, 21 nt, synthetic construct
  source 1..21: mol_type = other RNA
tgagttaaaaggtgtcctttt

SEQ ID NO: 8483 - RNA, 21 nt, synthetic construct
  source 1..21: mol_type = other RNA
tgagttgaggagctacagaca

SEQ ID NO: 8484 - RNA, 21 nt, synthetic construct
  source 1..21: mol_type = other RNA
tgagttggacttgcctgaaat

SEQ ID NO: 8485 - RNA, 21 nt, synthetic construct
  source 1..21: mol_type = other RNA
tgatcaatgaaactgggctgt

SEQ ID NO: 8486 - RNA, 21 nt, synthetic construct
  source 1..21: mol_type = other RNA
tgatcacaaggccacccttct

SEQ ID NO: 8487 - RNA, 21 nt, synthetic construct
  source 1..21: mol_type = other RNA
tgatcagcactggtaagattg

SEQ ID NO: 8488 - RNA, 21 nt, synthetic construct
  source 1..21: mol_type = other RNA
tgatcatttatatgtcaacgt

SEQ ID NO: 8489 - RNA, 21 nt, synthetic construct
  source 1..21: mol_type = other RNA
tgatgagctactgcactactg

SEQ ID NO: 8490 - RNA, 21 nt, synthetic construct
  source 1..21: mol_type = other RNA
tgatgatggaggggaagatga

SEQ ID NO: 8491 - RNA, 21 nt, synthetic construct
  source 1..21: mol_type = other RNA
tgatggaggggaagatgatga

SEQ ID NO: 8492 - RNA, 21 nt, synthetic construct
  source 1..21: mol_type = other RNA
tgattctttgttacaggcacc

SEQ ID NO: 8493 - RNA, 21 nt, synthetic construct
  source 1..21: mol_type = other RNA
tgattgtcagctactaatgat

SEQ ID NO: 8494 - RNA, 21 nt, synthetic construct
  source 1..21: mol_type = other RNA
tgattgtcaggaagcattcaa

SEQ ID NO: 8495 - RNA, 21 nt, synthetic construct
  source 1..21: mol_type = other RNA
tgcaacaacctgcccctgagc

SEQ ID NO: 8496 - RNA, 21 nt, synthetic construct
  source 1..21: mol_type = other RNA
tgcaacccatattttcctaat

SEQ ID NO: 8497 - RNA, 21 nt, synthetic construct
  source 1..21: mol_type = other RNA
tgcaagattgaccccggaagt

SEQ ID NO: 8498 - RNA, 21 nt, synthetic construct
  source 1..21: mol_type = other RNA
tgcaagcctctagtcttcctt

SEQ ID NO: 8499 - RNA, 21 nt, synthetic construct
  source 1..21: mol_type = other RNA
tgcaattgtaggggtgtgtgt

SEQ ID NO: 8500 - RNA, 21 nt, synthetic construct
  source 1..21: mol_type = other RNA
tgcactactgggcagatgtgg

SEQ ID NO: 8501 - RNA, 21 nt, synthetic construct
  source 1..21: mol_type = other RNA
tgcactggaaatacacatgct

SEQ ID NO: 8502 - RNA, 21 nt, synthetic construct
  source 1..21: mol_type = other RNA
tgcagtagctcatcatcttcc

SEQ ID NO: 8503 - RNA, 21 nt, synthetic construct
  source 1..21: mol_type = other RNA
tgcataataagctaaagaggc

SEQ ID NO: 8504 - RNA, 21 nt, synthetic construct
  source 1..21: mol_type = other RNA
tgcatatcctgagccatcggt

SEQ ID NO: 8505 - RNA, 21 nt, synthetic construct
  source 1..21: mol_type = other RNA
tgcatgactattccttgttga

SEQ ID NO: 8506 - RNA, 21 nt, synthetic construct
  source 1..21: mol_type = other RNA
tgcatgtaagaagaccctcac

SEQ ID NO: 8507 - RNA, 21 nt, synthetic construct
  source 1..21: mol_type = other RNA
tgcatttagaagtgaagatgc

SEQ ID NO: 8508 - RNA, 21 nt, synthetic construct
  source 1..21: mol_type = other RNA
tgcatttgaggtcaagtaaga

SEQ ID NO: 8509 - RNA, 21 nt, synthetic construct
  source 1..21: mol_type = other RNA
tgcatttggtcaagattttga

SEQ ID NO: 8510 - RNA, 21 nt, synthetic construct
  source 1..21: mol_type = other RNA
tgccagtggggcattggcctc

SEQ ID NO: 8511 - RNA, 21 nt, synthetic construct
  source 1..21: mol_type = other RNA
tgccatgtgaagagggagaag

SEQ ID NO: 8512 - RNA, 21 nt, synthetic construct
  source 1..21: mol_type = other RNA
tgcccagtagtgcagtagctc

SEQ ID NO: 8513 - RNA, 21 nt, synthetic construct
  source 1..21: mol_type = other RNA
tgccccactggcagcatcttc

SEQ ID NO: 8514 - RNA, 21 nt, synthetic construct
  source 1..21: mol_type = other RNA
tgcccccaggtagctgctgcg

SEQ ID NO: 8515 - RNA, 21 nt, synthetic construct
  source 1..21: mol_type = other RNA
tgcccctgagccacaaggtct

SEQ ID NO: 8516 - RNA, 21 nt, synthetic construct
  source 1..21: mol_type = other RNA
tgcctaaatactctcaggcac

SEQ ID NO: 8517 - RNA, 21 nt, synthetic construct
  source 1..21: mol_type = other RNA
tgcctctggaatgggaagaca

SEQ ID NO: 8518 - RNA, 21 nt, synthetic construct
  source 1..21: mol_type = other RNA
tgcctgaaataaatccaaaag

SEQ ID NO: 8519 - RNA, 21 nt, synthetic construct
  source 1..21: mol_type = other RNA
tgcctgagagtatttaggcag

SEQ ID NO: 8520 - RNA, 21 nt, synthetic construct
  source 1..21: mol_type = other RNA
tgcctgtaacaaagaatcata

SEQ ID NO: 8521 - RNA, 21 nt, synthetic construct
  source 1..21: mol_type = other RNA
tgcgggcccacatctgcccag

SEQ ID NO: 8522 - RNA, 21 nt, synthetic construct
  source 1..21: mol_type = other RNA
tgctacctcaagggggactgt

SEQ ID NO: 8523 - RNA, 21 nt, synthetic construct
  source 1..21: mol_type = other RNA
tgctgatcatttatatgtcaa

SEQ ID NO: 8524 - RNA, 21 nt, synthetic construct
  source 1..21: mol_type = other RNA
tgctgccagtggggcattggc

SEQ ID NO: 8525 - RNA, 21 nt, synthetic construct
  source 1..21: mol_type = other RNA
tgctgcgggcccacatctgcc

SEQ ID NO: 8526 - RNA, 21 nt, synthetic construct
  source 1..21: mol_type = other RNA
tgctgtgttaggaatgaaatg

SEQ ID NO: 8527 - RNA, 21 nt, synthetic construct
  source 1..21: mol_type = other RNA
tgcttatctgttagtttcacc

SEQ ID NO: 8528 - RNA, 21 nt, synthetic construct
  source 1..21: mol_type = other RNA
tgcttcctgacaatcaactct

SEQ ID NO: 8529 - RNA, 21 nt, synthetic construct
  source 1..21: mol_type = other RNA
tgcttctccctcttcacatgg

SEQ ID NO: 8530 - RNA, 21 nt, synthetic construct
  source 1..21: mol_type = other RNA
tgcttctcttagagcttatat

SEQ ID NO: 8531 - RNA, 21 nt, synthetic construct
  source 1..21: mol_type = other RNA
tgctttctggagtgaagtata

SEQ ID NO: 8532 - RNA, 21 nt, synthetic construct
  source 1..21: mol_type = other RNA
tgctttttcatgcttctccct

SEQ ID NO: 8533 - RNA, 21 nt, synthetic construct
  source 1..21: mol_type = other RNA
tggaaaaggaagactagaggc

SEQ ID NO: 8534 - RNA, 21 nt, synthetic construct
  source 1..21: mol_type = other RNA
tggaaagaatcccaaagtgct

SEQ ID NO: 8535 - RNA, 21 nt, synthetic construct
  source 1..21: mol_type = other RNA
tggaaatacacatgctgtgtt

SEQ ID NO: 8536 - RNA, 21 nt, synthetic construct
  source 1..21: mol_type = other RNA
tggaatatacaaagtacagcc

SEQ ID NO: 8537 - RNA, 21 nt, synthetic construct
  source 1..21: mol_type = other RNA
tggaatgggaagacacctatg

SEQ ID NO: 8538 - RNA, 21 nt, synthetic construct
  source 1..21: mol_type = other RNA
tggaattgtcctgctttctgg

SEQ ID NO: 8539 - RNA, 21 nt, synthetic construct
  source 1..21: mol_type = other RNA
tggaccttgagaccacagggt

SEQ ID NO: 8540 - RNA, 21 nt, synthetic construct
  source 1..21: mol_type = other RNA
tggaccttgagttggacttgc

SEQ ID NO: 8541 - RNA, 21 nt, synthetic construct
  source 1..21: mol_type = other RNA
tggacttgcctgaaataaatc

SEQ ID NO: 8542 - RNA, 21 nt, synthetic construct
  source 1..21: mol_type = other RNA
tggaggaatatgacggaagaa

SEQ ID NO: 8543 - RNA, 21 nt, synthetic construct
  source 1..21: mol_type = other RNA
tggaggggaagatgatgagct

SEQ ID NO: 8544 - RNA, 21 nt, synthetic construct
  source 1..21: mol_type = other RNA
tggagtgaagtataagaaggg

SEQ ID NO: 8545 - RNA, 21 nt, synthetic construct
  source 1..21: mol_type = other RNA
tggatttatttcaggcaagtc

SEQ ID NO: 8546 - RNA, 21 nt, synthetic construct
  source 1..21: mol_type = other RNA
tggcagcatcttcacttctaa

SEQ ID NO: 8547 - RNA, 21 nt, synthetic construct
  source 1..21: mol_type = other RNA
tggcagcccagagttctatgt

SEQ ID NO: 8548 - RNA, 21 nt, synthetic construct
  source 1..21: mol_type = other RNA
tggcctctttcagcctcttta

SEQ ID NO: 8549 - RNA, 21 nt, synthetic construct
  source 1..21: mol_type = other RNA
tggccttgtgatcaatgaaac

SEQ ID NO: 8550 - RNA, 21 nt, synthetic construct
  source 1..21: mol_type = other RNA
tggctcaggatatgcatttag

SEQ ID NO: 8551 - RNA, 21 nt, synthetic construct
  source 1..21: mol_type = other RNA
tggctcaggggcaggttgttg

SEQ ID NO: 8552 - RNA, 21 nt, synthetic construct
  source 1..21: mol_type = other RNA
tggctcataaacattaggtga

SEQ ID NO: 8553 - RNA, 21 nt, synthetic construct
  source 1..21: mol_type = other RNA
tgggaagacacctatggaatt

SEQ ID NO: 8554 - RNA, 21 nt, synthetic construct
  source 1..21: mol_type = other RNA
tgggattctttccattatgat

SEQ ID NO: 8555 - RNA, 21 nt, synthetic construct
  source 1..21: mol_type = other RNA
tgggcagatgtgggcccgcag

SEQ ID NO: 8556 - RNA, 21 nt, synthetic construct
  source 1..21: mol_type = other RNA
tgggcccgcagcagctacctg

SEQ ID NO: 8557 - RNA, 21 nt, synthetic construct
  source 1..21: mol_type = other RNA
tgggccttgctacctcaaggg

SEQ ID NO: 8558 - RNA, 21 nt, synthetic construct
  source 1..21: mol_type = other RNA
tgggctgccatgtgaagaggg

SEQ ID NO: 8559 - RNA, 21 nt, synthetic construct
  source 1..21: mol_type = other RNA
tgggctgtactttgtatattc

SEQ ID NO: 8560 - RNA, 21 nt, synthetic construct
  source 1..21: mol_type = other RNA
tggggactcatttcattccta

SEQ ID NO: 8561 - RNA, 21 nt, synthetic construct
  source 1..21: mol_type = other RNA
tggggatacttagagttcctc

SEQ ID NO: 8562 - RNA, 21 nt, synthetic construct
  source 1..21: mol_type = other RNA
tggggcattggcctctttcag

SEQ ID NO: 8563 - RNA, 21 nt, synthetic construct
  source 1..21: mol_type = other RNA
tgggggcagtgttcaatctta

SEQ ID NO: 8564 - RNA, 21 nt, synthetic construct
  source 1..21: mol_type = other RNA
tgggttgcatttggtcaagat

SEQ ID NO: 8565 - RNA, 21 nt, synthetic construct
  source 1..21: mol_type = other RNA
tggtaagattgaacactgccc

SEQ ID NO: 8566 - RNA, 21 nt, synthetic construct
  source 1..21: mol_type = other RNA
tggtagctgctttttcatgct

SEQ ID NO: 8567 - RNA, 21 nt, synthetic construct
  source 1..21: mol_type = other RNA
tggtcaagattttgaatgctt

SEQ ID NO: 8568 - RNA, 21 nt, synthetic construct
  source 1..21: mol_type = other RNA
tggtcaattttgaggaatctc

SEQ ID NO: 8569 - RNA, 21 nt, synthetic construct
  source 1..21: mol_type = other RNA
tggtctcaaggtccacttggt

SEQ ID NO: 8570 - RNA, 21 nt, synthetic construct
  source 1..21: mol_type = other RNA
tggtgatgatggaggggaaga

SEQ ID NO: 8571 - RNA, 21 nt, synthetic construct
  source 1..21: mol_type = other RNA
tggttcatgtcttcttacttg

SEQ ID NO: 8572 - RNA, 21 nt, synthetic construct
  source 1..21: mol_type = other RNA
tggttgtgacctgaggattta

SEQ ID NO: 8573 - RNA, 21 nt, synthetic construct
  source 1..21: mol_type = other RNA
tgtaacaaagaatcataatgg

SEQ ID NO: 8574 - RNA, 21 nt, synthetic construct
  source 1..21: mol_type = other RNA
tgtaagaagaccctcactgaa

SEQ ID NO: 8575 - RNA, 21 nt, synthetic construct
  source 1..21: mol_type = other RNA
tgtacttcacaatatctacat

SEQ ID NO: 8576 - RNA, 21 nt, synthetic construct
  source 1..21: mol_type = other RNA
tgtactttgtatattccaaag

SEQ ID NO: 8577 - RNA, 21 nt, synthetic construct
  source 1..21: mol_type = other RNA
tgtagaacacctggtagctgc

SEQ ID NO: 8578 - RNA, 21 nt, synthetic construct
  source 1..21: mol_type = other RNA
tgtagaccttgtggctcaggg

SEQ ID NO: 8579 - RNA, 21 nt, synthetic construct
  source 1..21: mol_type = other RNA
tgtagatattgtgaagtacat

SEQ ID NO: 8580 - RNA, 21 nt, synthetic construct
  source 1..21: mol_type = other RNA
tgtagatgtgcatttttgtga

SEQ ID NO: 8581 - RNA, 21 nt, synthetic construct
  source 1..21: mol_type = other RNA
tgtagctcctcaactcaccta

SEQ ID NO: 8582 - RNA, 21 nt, synthetic construct
  source 1..21: mol_type = other RNA
tgtatctgaaagacagtcccc

SEQ ID NO: 8583 - RNA, 21 nt, synthetic construct
  source 1..21: mol_type = other RNA
tgtatgactaaagagagaatg

SEQ ID NO: 8584 - RNA, 21 nt, synthetic construct
  source 1..21: mol_type = other RNA
tgtattcagtgagggtcttct

SEQ ID NO: 8585 - RNA, 21 nt, synthetic construct
  source 1..21: mol_type = other RNA
tgtatttccagtgcaattgta

SEQ ID NO: 8586 - RNA, 21 nt, synthetic construct
  source 1..21: mol_type = other RNA
tgtcaacgtatctgagctctc

SEQ ID NO: 8587 - RNA, 21 nt, synthetic construct
  source 1..21: mol_type = other RNA
tgtcagctactaatgatgttt

SEQ ID NO: 8588 - RNA, 21 nt, synthetic construct
  source 1..21: mol_type = other RNA
tgtcaggaagcattcaaaatc

SEQ ID NO: 8589 - RNA, 21 nt, synthetic construct
  source 1..21: mol_type = other RNA
tgtcctgctttctggagtgaa

SEQ ID NO: 8590 - RNA, 21 nt, synthetic construct
  source 1..21: mol_type = other RNA
tgtccttttcaatctgcctaa

SEQ ID NO: 8591 - RNA, 21 nt, synthetic construct
  source 1..21: mol_type = other RNA
tgtctggctcataaacattag

SEQ ID NO: 8592 - RNA, 21 nt, synthetic construct
  source 1..21: mol_type = other RNA
tgtctgtagctcctcaactca

SEQ ID NO: 8593 - RNA, 21 nt, synthetic construct
  source 1..21: mol_type = other RNA
tgtcttcccattccagaggca

SEQ ID NO: 8594 - RNA, 21 nt, synthetic construct
  source 1..21: mol_type = other RNA
tgtcttcttacttgacctcaa

SEQ ID NO: 8595 - RNA, 21 nt, synthetic construct
  source 1..21: mol_type = other RNA
tgtctttcagatacatggttg

SEQ ID NO: 8596 - RNA, 21 nt, synthetic construct
  source 1..21: mol_type = other RNA
tgtgaagagggagaagcatga

SEQ ID NO: 8597 - RNA, 21 nt, synthetic construct
  source 1..21: mol_type = other RNA
tgtgaagtacatattaggaaa

SEQ ID NO: 8598 - RNA, 21 nt, synthetic construct
  source 1..21: mol_type = other RNA
tgtgacctgaggatttaaggg

SEQ ID NO: 8599 - RNA, 21 nt, synthetic construct
  source 1..21: mol_type = other RNA
tgtgatcaatgaaactgggct

SEQ ID NO: 8600 - RNA, 21 nt, synthetic construct
  source 1..21: mol_type = other RNA
tgtgcatttttgtgaaatgaa

SEQ ID NO: 8601 - RNA, 21 nt, synthetic construct
  source 1..21: mol_type = other RNA
tgtggctcaggggcaggttgt

SEQ ID NO: 8602 - RNA, 21 nt, synthetic construct
  source 1..21: mol_type = other RNA
tgtgggcccgcagcagctacc

SEQ ID NO: 8603 - RNA, 21 nt, synthetic construct
  source 1..21: mol_type = other RNA
tgtggtctcaaggtccacttg

SEQ ID NO: 8604 - RNA, 21 nt, synthetic construct
  source 1..21: mol_type = other RNA
tgtgtatgactaaagagagaa

SEQ ID NO: 8605 - RNA, 21 nt, synthetic construct
  source 1..21: mol_type = other RNA
tgtgtatttccagtgcaattg

SEQ ID NO: 8606 - RNA, 21 nt, synthetic construct
  source 1..21: mol_type = other RNA
tgtgtgtatgactaaagagag

SEQ ID NO: 8607 - RNA, 21 nt, synthetic construct
  source 1..21: mol_type = other RNA
tgtgtgtgtatgactaaagag

SEQ ID NO: 8608 - RNA, 21 nt, synthetic construct
  source 1..21: mol_type = other RNA
tgtgtgtgtgtatgactaaag

SEQ ID NO: 8609 - RNA, 21 nt, synthetic construct
  source 1..21: mol_type = other RNA
tgtgttaggaatgaaatgagt

SEQ ID NO: 8610 - RNA, 21 nt, synthetic construct
  source 1..21: mol_type = other RNA
tgttacaggcaccgagaatgt

SEQ ID NO: 8611 - RNA, 21 nt, synthetic construct
  source 1..21: mol_type = other RNA
tgttaggaatgaaatgagtcc

SEQ ID NO: 8612 - RNA, 21 nt, synthetic construct
  source 1..21: mol_type = other RNA
tgttagtttcaccgatggctc

SEQ ID NO: 8613 - RNA, 21 nt, synthetic construct
  source 1..21: mol_type = other RNA
tgttcaatcttaccagtgctg

SEQ ID NO: 8614 - RNA, 21 nt, synthetic construct
  source 1..21: mol_type = other RNA
tgttctacactcatcttagtg

SEQ ID NO: 8615 - RNA, 21 nt, synthetic construct
  source 1..21: mol_type = other RNA
tgttcttccgtcatattcctc

SEQ ID NO: 8616 - RNA, 21 nt, synthetic construct
  source 1..21: mol_type = other RNA
tgttgaaagctccttttggat

SEQ ID NO: 8617 - RNA, 21 nt, synthetic construct
  source 1..21: mol_type = other RNA
tgttgcaagattgaccccgga

SEQ ID NO: 8618 - RNA, 21 nt, synthetic construct
  source 1..21: mol_type = other RNA
tgttgtattcagtgagggtct

SEQ ID NO: 8619 - RNA, 21 nt, synthetic construct
  source 1..21: mol_type = other RNA
tgtttatgagccagacaaatg

SEQ ID NO: 8620 - RNA, 21 nt, synthetic construct
  source 1..21: mol_type = other RNA
tgttttggggactcatttcat

SEQ ID NO: 8621 - RNA, 21 nt, synthetic construct
  source 1..21: mol_type = other RNA
ttaaaaggtgtccttttcaat

SEQ ID NO: 8622 - RNA, 21 nt, synthetic construct
  source 1..21: mol_type = other RNA
ttaaatcctcaggtcacaacc

SEQ ID NO: 8623 - RNA, 21 nt, synthetic construct
  source 1..21: mol_type = other RNA
ttaactcacctctcaaggtgg

SEQ ID NO: 8624 - RNA, 21 nt, synthetic construct
  source 1..21: mol_type = other RNA
ttaagcactattagagttgat

SEQ ID NO: 8625 - RNA, 21 nt, synthetic construct
  source 1..21: mol_type = other RNA
ttaagggatggaaaaggaaga

SEQ ID NO: 8626 - RNA, 21 nt, synthetic construct
  source 1..21: mol_type = other RNA
ttacaggcaccgagaatgttg

SEQ ID NO: 8627 - RNA, 21 nt, synthetic construct
  source 1..21: mol_type = other RNA
ttacatgcatttgaggtcaag

SEQ ID NO: 8628 - RNA, 21 nt, synthetic construct
  source 1..21: mol_type = other RNA
ttaccagtgctgatcatttat

SEQ ID NO: 8629 - RNA, 21 nt, synthetic construct
  source 1..21: mol_type = other RNA
ttacttgacctcaaatgcatg

SEQ ID NO: 8630 - RNA, 21 nt, synthetic construct
  source 1..21: mol_type = other RNA
ttagaagtgaagatgctgcca

SEQ ID NO: 8631 - RNA, 21 nt, synthetic construct
  source 1..21: mol_type = other RNA
ttagagcttatataagccgaa

SEQ ID NO: 8632 - RNA, 21 nt, synthetic construct
  source 1..21: mol_type = other RNA
ttagagttcctcatgtagacc

SEQ ID NO: 8633 - RNA, 21 nt, synthetic construct
  source 1..21: mol_type = other RNA
ttagagttgattgtcaggaag

SEQ ID NO: 8634 - RNA, 21 nt, synthetic construct
  source 1..21: mol_type = other RNA
ttagcttattatgcaagcctc

SEQ ID NO: 8635 - RNA, 21 nt, synthetic construct
  source 1..21: mol_type = other RNA
ttaggaaaatatgggttgcat

SEQ ID NO: 8636 - RNA, 21 nt, synthetic construct
  source 1..21: mol_type = other RNA
ttaggaatgaaatgagtcccc

SEQ ID NO: 8637 - RNA, 21 nt, synthetic construct
  source 1..21: mol_type = other RNA
ttaggcagattgaaaaggaca

SEQ ID NO: 8638 - RNA, 21 nt, synthetic construct
  source 1..21: mol_type = other RNA
ttaggtgagttgaggagctac

SEQ ID NO: 8639 - RNA, 21 nt, synthetic construct
  source 1..21: mol_type = other RNA
ttagtagctgacaatcaatga

SEQ ID NO: 8640 - RNA, 21 nt, synthetic construct
  source 1..21: mol_type = other RNA
ttagtgcctgagagtatttag

SEQ ID NO: 8641 - RNA, 21 nt, synthetic construct
  source 1..21: mol_type = other RNA
ttagtttcaccgatggctcag

SEQ ID NO: 8642 - RNA, 21 nt, synthetic construct
  source 1..21: mol_type = other RNA
ttatacttcactccagaaagc

SEQ ID NO: 8643 - RNA, 21 nt, synthetic construct
  source 1..21: mol_type = other RNA
ttatataagccgaaaaacgtc

SEQ ID NO: 8644 - RNA, 21 nt, synthetic construct
  source 1..21: mol_type = other RNA
ttatataagctctaagagaag

SEQ ID NO: 8645 - RNA, 21 nt, synthetic construct
  source 1..21: mol_type = other RNA
ttatatgtcaacgtatctgag

SEQ ID NO: 8646 - RNA, 21 nt, synthetic construct
  source 1..21: mol_type = other RNA
ttatctgttagtttcaccgat

SEQ ID NO: 8647 - RNA, 21 nt, synthetic construct
  source 1..21: mol_type = other RNA
ttatgagccagacaaatggag

SEQ ID NO: 8648 - RNA, 21 nt, synthetic construct
  source 1..21: mol_type = other RNA
ttatgattctttgttacaggc

SEQ ID NO: 8649 - RNA, 21 nt, synthetic construct
  source 1..21: mol_type = other RNA
ttatgcaagcctctagtcttc

SEQ ID NO: 8650 - RNA, 21 nt, synthetic construct
  source 1..21: mol_type = other RNA
ttatgtagatgtgcatttttg

SEQ ID NO: 8651 - RNA, 21 nt, synthetic construct
  source 1..21: mol_type = other RNA
ttattatgcaagcctctagtc

SEQ ID NO: 8652 - RNA, 21 nt, synthetic construct
  source 1..21: mol_type = other RNA
ttatttcaggcaagtccaact

SEQ ID NO: 8653 - RNA, 21 nt, synthetic construct
  source 1..21: mol_type = other RNA
ttcaaaatcttgaccaaatgc

SEQ ID NO: 8654 - RNA, 21 nt, synthetic construct
  source 1..21: mol_type = other RNA
ttcaaaatgtctgtagctcct

SEQ ID NO: 8655 - RNA, 21 nt, synthetic construct
  source 1..21: mol_type = other RNA
ttcaatctgcctaaatactct

SEQ ID NO: 8656 - RNA, 21 nt, synthetic construct
  source 1..21: mol_type = other RNA
ttcaatcttaccagtgctgat

SEQ ID NO: 8657 - RNA, 21 nt, synthetic construct
  source 1..21: mol_type = other RNA
ttcacaaaaatgcacatctac

SEQ ID NO: 8658 - RNA, 21 nt, synthetic construct
  source 1..21: mol_type = other RNA
ttcacaatatctacattctct

SEQ ID NO: 8659 - RNA, 21 nt, synthetic construct
  source 1..21: mol_type = other RNA
ttcacatggcagcccagagtt

SEQ ID NO: 8660 - RNA, 21 nt, synthetic construct
  source 1..21: mol_type = other RNA
ttcaccgatggctcaggatat

SEQ ID NO: 8661 - RNA, 21 nt, synthetic construct
  source 1..21: mol_type = other RNA
ttcactccagaaagcaggaca

SEQ ID NO: 8662 - RNA, 21 nt, synthetic construct
  source 1..21: mol_type = other RNA
ttcacttctaaatgcatatcc

SEQ ID NO: 8663 - RNA, 21 nt, synthetic construct
  source 1..21: mol_type = other RNA
ttcagatacatggttgtgacc

SEQ ID NO: 8664 - RNA, 21 nt, synthetic construct
  source 1..21: mol_type = other RNA
ttcagcctctttagcttatta

SEQ ID NO: 8665 - RNA, 21 nt, synthetic construct
  source 1..21: mol_type = other RNA
ttcaggcaagtccaactcaag

SEQ ID NO: 8666 - RNA, 21 nt, synthetic construct
  source 1..21: mol_type = other RNA
ttcagtgagggtcttcttaca

SEQ ID NO: 8667 - RNA, 21 nt, synthetic construct
  source 1..21: mol_type = other RNA
ttcatgcttctccctcttcac

SEQ ID NO: 8668 - RNA, 21 nt, synthetic construct
  source 1..21: mol_type = other RNA
ttcatgtcttcttacttgacc

SEQ ID NO: 8669 - RNA, 21 nt, synthetic construct
  source 1..21: mol_type = other RNA
ttcattcctaacacagcatgt

SEQ ID NO: 8670 - RNA, 21 nt, synthetic construct
  source 1..21: mol_type = other RNA
ttcattgatcacaaggccacc

SEQ ID NO: 8671 - RNA, 21 nt, synthetic construct
  source 1..21: mol_type = other RNA
ttcatttcacaaaaatgcaca

SEQ ID NO: 8672 - RNA, 21 nt, synthetic construct
  source 1..21: mol_type = other RNA
ttccaaagtatacttccgggg

SEQ ID NO: 8673 - RNA, 21 nt, synthetic construct
  source 1..21: mol_type = other RNA
ttccagaggcatggaccttga

SEQ ID NO: 8674 - RNA, 21 nt, synthetic construct
  source 1..21: mol_type = other RNA
ttccagtgcaattgtaggggt

SEQ ID NO: 8675 - RNA, 21 nt, synthetic construct
  source 1..21: mol_type = other RNA
ttccataggtgtcttcccatt

SEQ ID NO: 8676 - RNA, 21 nt, synthetic construct
  source 1..21: mol_type = other RNA
ttccatcccttaaatcctcag

SEQ ID NO: 8677 - RNA, 21 nt, synthetic construct
  source 1..21: mol_type = other RNA
ttcccattccagaggcatgga

SEQ ID NO: 8678 - RNA, 21 nt, synthetic construct
  source 1..21: mol_type = other RNA
ttcccctccatcatcaccaga

SEQ ID NO: 8679 - RNA, 21 nt, synthetic construct
  source 1..21: mol_type = other RNA
ttccggggtcaatcttgcaac

SEQ ID NO: 8680 - RNA, 21 nt, synthetic construct
  source 1..21: mol_type = other RNA
ttccgtcatattcctccattt

SEQ ID NO: 8681 - RNA, 21 nt, synthetic construct
  source 1..21: mol_type = other RNA
ttcctaacacagcatgtgtat

SEQ ID NO: 8682 - RNA, 21 nt, synthetic construct
  source 1..21: mol_type = other RNA
ttcctaatatgtacttcacaa

SEQ ID NO: 8683 - RNA, 21 nt, synthetic construct
  source 1..21: mol_type = other RNA
ttcctcaaaattgaccagaga

SEQ ID NO: 8684 - RNA, 21 nt, synthetic construct
  source 1..21: mol_type = other RNA
ttcctcatgtagaccttgtgg

SEQ ID NO: 8685 - RNA, 21 nt, synthetic construct
  source 1..21: mol_type = other RNA
ttcctccatttgtctggctca

SEQ ID NO: 8686 - RNA, 21 nt, synthetic construct
  source 1..21: mol_type = other RNA
ttcctgacaatcaactctaat

SEQ ID NO: 8687 - RNA, 21 nt, synthetic construct
  source 1..21: mol_type = other RNA
ttccttgttgaaagctccttt

SEQ ID NO: 8688 - RNA, 21 nt, synthetic construct
  source 1..21: mol_type = other RNA
ttccttttccatcccttaaat

SEQ ID NO: 8689 - RNA, 21 nt, synthetic construct
  source 1..21: mol_type = other RNA
ttcggcttatataagctctaa

SEQ ID NO: 8690 - RNA, 21 nt, synthetic construct
  source 1..21: mol_type = other RNA
ttctaaatgcatatcctgagc

SEQ ID NO: 8691 - RNA, 21 nt, synthetic construct
  source 1..21: mol_type = other RNA
ttctacactcatcttagtgcc

SEQ ID NO: 8692 - RNA, 21 nt, synthetic construct
  source 1..21: mol_type = other RNA
ttctatgttcttccgtcatat

SEQ ID NO: 8693 - RNA, 21 nt, synthetic construct
  source 1..21: mol_type = other RNA
ttctccctcttcacatggcag

SEQ ID NO: 8694 - RNA, 21 nt, synthetic construct
  source 1..21: mol_type = other RNA
ttctcggtgcctgtaacaaag

SEQ ID NO: 8695 - RNA, 21 nt, synthetic construct
  source 1..21: mol_type = other RNA
ttctctctttagtcatacaca

SEQ ID NO: 8696 - RNA, 21 nt, synthetic construct
  source 1..21: mol_type = other RNA
ttctcttagagcttatataag

SEQ ID NO: 8697 - RNA, 21 nt, synthetic construct
  source 1..21: mol_type = other RNA
ttctggagtgaagtataagaa

SEQ ID NO: 8698 - RNA, 21 nt, synthetic construct
  source 1..21: mol_type = other RNA
ttcttacatgcatttgaggtc

SEQ ID NO: 8699 - RNA, 21 nt, synthetic construct
  source 1..21: mol_type = other RNA
ttcttacttgacctcaaatgc

SEQ ID NO: 8700 - RNA, 21 nt, synthetic construct
  source 1..21: mol_type = other RNA
ttcttatacttcactccagaa

SEQ ID NO: 8701 - RNA, 21 nt, synthetic construct
  source 1..21: mol_type = other RNA
ttcttccgtcatattcctcca

SEQ ID NO: 8702 - RNA, 21 nt, synthetic construct
  source 1..21: mol_type = other RNA
ttctttgttacaggcaccgag

SEQ ID NO: 8703 - RNA, 21 nt, synthetic construct
  source 1..21: mol_type = other RNA
ttgaaaaggacaccttttaac

SEQ ID NO: 8704 - RNA, 21 nt, synthetic construct
  source 1..21: mol_type = other RNA
ttgaaagctccttttggattt

SEQ ID NO: 8705 - RNA, 21 nt, synthetic construct
  source 1..21: mol_type = other RNA
ttgaacactgcccccaggtag

SEQ ID NO: 8706 - RNA, 21 nt, synthetic construct
  source 1..21: mol_type = other RNA
ttgaaccctgtggtctcaagg

SEQ ID NO: 8707 - RNA, 21 nt, synthetic construct
  source 1..21: mol_type = other RNA
ttgaatgcttcctgacaatca

SEQ ID NO: 8708 - RNA, 21 nt, synthetic construct
  source 1..21: mol_type = other RNA
ttgacatataaatgatcagca

SEQ ID NO: 8709 - RNA, 21 nt, synthetic construct
  source 1..21: mol_type = other RNA
ttgaccaaatgcaacccatat

SEQ ID NO: 8710 - RNA, 21 nt, synthetic construct
  source 1..21: mol_type = other RNA
ttgaccagagagagctcagat

SEQ ID NO: 8711 - RNA, 21 nt, synthetic construct
  source 1..21: mol_type = other RNA
ttgaccccggaagtatacttt

SEQ ID NO: 8712 - RNA, 21 nt, synthetic construct
  source 1..21: mol_type = other RNA
ttgacctcaaatgcatgtaag

SEQ ID NO: 8713 - RNA, 21 nt, synthetic construct
  source 1..21: mol_type = other RNA
ttgagaccacagggttcaaaa

SEQ ID NO: 8714 - RNA, 21 nt, synthetic construct
  source 1..21: mol_type = other RNA
ttgagaggtgagttaaaaggt

SEQ ID NO: 8715 - RNA, 21 nt, synthetic construct
  source 1..21: mol_type = other RNA
ttgaggaatctcagacgtttt

SEQ ID NO: 8716 - RNA, 21 nt, synthetic construct
  source 1..21: mol_type = other RNA
ttgaggagctacagacatttt

SEQ ID NO: 8717 - RNA, 21 nt, synthetic construct
  source 1..21: mol_type = other RNA
ttgaggtagcaaggcccacct

SEQ ID NO: 8718 - RNA, 21 nt, synthetic construct
  source 1..21: mol_type = other RNA
ttgaggtcaagtaagaagaca

SEQ ID NO: 8719 - RNA, 21 nt, synthetic construct
  source 1..21: mol_type = other RNA
ttgagttggacttgcctgaaa

SEQ ID NO: 8720 - RNA, 21 nt, synthetic construct
  source 1..21: mol_type = other RNA
ttgatcacaaggccacccttc

SEQ ID NO: 8721 - RNA, 21 nt, synthetic construct
  source 1..21: mol_type = other RNA
ttgattgtcagctactaatga

SEQ ID NO: 8722 - RNA, 21 nt, synthetic construct
  source 1..21: mol_type = other RNA
ttgattgtcaggaagcattca

SEQ ID NO: 8723 - RNA, 21 nt, synthetic construct
  source 1..21: mol_type = other RNA
ttgcaacaacctgcccctgag

SEQ ID NO: 8724 - RNA, 21 nt, synthetic construct
  source 1..21: mol_type = other RNA
ttgcaagattgaccccggaag

SEQ ID NO: 8725 - RNA, 21 nt, synthetic construct
  source 1..21: mol_type = other RNA
ttgcactggaaatacacatgc

SEQ ID NO: 8726 - RNA, 21 nt, synthetic construct
  source 1..21: mol_type = other RNA
ttgcataataagctaaagagg

SEQ ID NO: 8727 - RNA, 21 nt, synthetic construct
  source 1..21: mol_type = other RNA
ttgcatttggtcaagattttg

SEQ ID NO: 8728 - RNA, 21 nt, synthetic construct
  source 1..21: mol_type = other RNA
ttgcctgaaataaatccaaaa

SEQ ID NO: 8729 - RNA, 21 nt, synthetic construct
  source 1..21: mol_type = other RNA
ttgctacctcaagggggactg

SEQ ID NO: 8730 - RNA, 21 nt, synthetic construct
  source 1..21: mol_type = other RNA
ttgcttatctgttagtttcac

SEQ ID NO: 8731 - RNA, 21 nt, synthetic construct
  source 1..21: mol_type = other RNA
ttggaatatacaaagtacagc

SEQ ID NO: 8732 - RNA, 21 nt, synthetic construct
  source 1..21: mol_type = other RNA
ttggacttgcctgaaataaat

SEQ ID NO: 8733 - RNA, 21 nt, synthetic construct
  source 1..21: mol_type = other RNA
ttggatttatttcaggcaagt

SEQ ID NO: 8734 - RNA, 21 nt, synthetic construct
  source 1..21: mol_type = other RNA
ttggcctctttcagcctcttt

SEQ ID NO: 8735 - RNA, 21 nt, synthetic construct
  source 1..21: mol_type = other RNA
ttgggattctttccattatga

SEQ ID NO: 8736 - RNA, 21 nt, synthetic construct
  source 1..21: mol_type = other RNA
ttggggactcatttcattcct

SEQ ID NO: 8737 - RNA, 21 nt, synthetic construct
  source 1..21: mol_type = other RNA
ttggtcaagattttgaatgct

SEQ ID NO: 8738 - RNA, 21 nt, synthetic construct
  source 1..21: mol_type = other RNA
ttggttcatgtcttcttactt

SEQ ID NO: 8739 - RNA, 21 nt, synthetic construct
  source 1..21: mol_type = other RNA
ttgtattcagtgagggtcttc

SEQ ID NO: 8740 - RNA, 21 nt, synthetic construct
  source 1..21: mol_type = other RNA
ttgtcagctactaatgatgtt

SEQ ID NO: 8741 - RNA, 21 nt, synthetic construct
  source 1..21: mol_type = other RNA
ttgtcaggaagcattcaaaat

SEQ ID NO: 8742 - RNA, 21 nt, synthetic construct
  source 1..21: mol_type = other RNA
ttgtcctgctttctggagtga

SEQ ID NO: 8743 - RNA, 21 nt, synthetic construct
  source 1..21: mol_type = other RNA
ttgtctggctcataaacatta

SEQ ID NO: 8744 - RNA, 21 nt, synthetic construct
  source 1..21: mol_type = other RNA
ttgtgaagtacatattaggaa

SEQ ID NO: 8745 - RNA, 21 nt, synthetic construct
  source 1..21: mol_type = other RNA
ttgtgacctgaggatttaagg

SEQ ID NO: 8746 - RNA, 21 nt, synthetic construct
  source 1..21: mol_type = other RNA
ttgtgatcaatgaaactgggc

SEQ ID NO: 8747 - RNA, 21 nt, synthetic construct
  source 1..21: mol_type = other RNA
ttgtggctcaggggcaggttg

SEQ ID NO: 8748 - RNA, 21 nt, synthetic construct
  source 1..21: mol_type = other RNA
ttgttacaggcaccgagaatg

SEQ ID NO: 8749 - RNA, 21 nt, synthetic construct
  source 1..21: mol_type = other RNA
ttgttgaaagctccttttgga

SEQ ID NO: 8750 - RNA, 21 nt, synthetic construct
  source 1..21: mol_type = other RNA
ttgttgcaagattgaccccgg

SEQ ID NO: 8751 - RNA, 21 nt, synthetic construct
  source 1..21: mol_type = other RNA
tttaactcacctctcaaggtg

SEQ ID NO: 8752 - RNA, 21 nt, synthetic construct
  source 1..21: mol_type = other RNA
tttaagcactattagagttga

SEQ ID NO: 8753 - RNA, 21 nt, synthetic construct
  source 1..21: mol_type = other RNA
tttaagggatggaaaaggaag

SEQ ID NO: 8754 - RNA, 21 nt, synthetic construct
  source 1..21: mol_type = other RNA
tttagaagtgaagatgctgcc

SEQ ID NO: 8755 - RNA, 21 nt, synthetic construct
  source 1..21: mol_type = other RNA
tttagcttattatgcaagcct

SEQ ID NO: 8756 - RNA, 21 nt, synthetic construct
  source 1..21: mol_type = other RNA
tttaggcagattgaaaaggac

SEQ ID NO: 8757 - RNA, 21 nt, synthetic construct
  source 1..21: mol_type = other RNA
tttatatgtcaacgtatctga

SEQ ID NO: 8758 - RNA, 21 nt, synthetic construct
  source 1..21: mol_type = other RNA
tttatgagccagacaaatgga

SEQ ID NO: 8759 - RNA, 21 nt, synthetic construct
  source 1..21: mol_type = other RNA
tttatttcaggcaagtccaac

SEQ ID NO: 8760 - RNA, 21 nt, synthetic construct
  source 1..21: mol_type = other RNA
tttcaatctgcctaaatactc

SEQ ID NO: 8761 - RNA, 21 nt, synthetic construct
  source 1..21: mol_type = other RNA
tttcacaaaaatgcacatcta

SEQ ID NO: 8762 - RNA, 21 nt, synthetic construct
  source 1..21: mol_type = other RNA
tttcaccgatggctcaggata

SEQ ID NO: 8763 - RNA, 21 nt, synthetic construct
  source 1..21: mol_type = other RNA
tttcagatacatggttgtgac

SEQ ID NO: 8764 - RNA, 21 nt, synthetic construct
  source 1..21: mol_type = other RNA
tttcagcctctttagcttatt

SEQ ID NO: 8765 - RNA, 21 nt, synthetic construct
  source 1..21: mol_type = other RNA
tttcaggcaagtccaactcaa

SEQ ID NO: 8766 - RNA, 21 nt, synthetic construct
  source 1..21: mol_type = other RNA
tttcatgcttctccctcttca

SEQ ID NO: 8767 - RNA, 21 nt, synthetic construct
  source 1..21: mol_type = other RNA
tttcattcctaacacagcatg

SEQ ID NO: 8768 - RNA, 21 nt, synthetic construct
  source 1..21: mol_type = other RNA
tttcattgatcacaaggccac

SEQ ID NO: 8769 - RNA, 21 nt, synthetic construct
  source 1..21: mol_type = other RNA
tttcatttcacaaaaatgcac

SEQ ID NO: 8770 - RNA, 21 nt, synthetic construct
  source 1..21: mol_type = other RNA
tttccagtgcaattgtagggg

SEQ ID NO: 8771 - RNA, 21 nt, synthetic construct
  source 1..21: mol_type = other RNA
tttccatcccttaaatcctca

SEQ ID NO: 8772 - RNA, 21 nt, synthetic construct
  source 1..21: mol_type = other RNA
tttcctaatatgtacttcaca

SEQ ID NO: 8773 - RNA, 21 nt, synthetic construct
  source 1..21: mol_type = other RNA
tttcggcttatataagctcta

SEQ ID NO: 8774 - RNA, 21 nt, synthetic construct
  source 1..21: mol_type = other RNA
tttctggagtgaagtataaga

SEQ ID NO: 8775 - RNA, 21 nt, synthetic construct
  source 1..21: mol_type = other RNA
tttgaaccctgtggtctcaag

SEQ ID NO: 8776 - RNA, 21 nt, synthetic construct
  source 1..21: mol_type = other RNA
tttgaatgcttcctgacaatc

SEQ ID NO: 8777 - RNA, 21 nt, synthetic construct
  source 1..21: mol_type = other RNA
tttgaggaatctcagacgttt

SEQ ID NO: 8778 - RNA, 21 nt, synthetic construct
  source 1..21: mol_type = other RNA
tttgaggtcaagtaagaagac

SEQ ID NO: 8779 - RNA, 21 nt, synthetic construct
  source 1..21: mol_type = other RNA
tttggaatatacaaagtacag

SEQ ID NO: 8780 - RNA, 21 nt, synthetic construct
  source 1..21: mol_type = other RNA
tttggatttatttcaggcaag

SEQ ID NO: 8781 - RNA, 21 nt, synthetic construct
  source 1..21: mol_type = other RNA
tttgggattctttccattatg

SEQ ID NO: 8782 - RNA, 21 nt, synthetic construct
  source 1..21: mol_type = other RNA
tttggggactcatttcattcc

SEQ ID NO: 8783 - RNA, 21 nt, synthetic construct
  source 1..21: mol_type = other RNA
tttggtcaagattttgaatgc

SEQ ID NO: 8784 - RNA, 21 nt, synthetic construct
  source 1..21: mol_type = other RNA
tttgtctggctcataaacatt

SEQ ID NO: 8785 - RNA, 21 nt, synthetic construct
  source 1..21: mol_type = other RNA
tttgttacaggcaccgagaat

SEQ ID NO: 8786 - RNA, 21 nt, synthetic construct
  source 1..21: mol_type = other RNA
ttttaactcacctctcaaggt

SEQ ID NO: 8787 - RNA, 21 nt, synthetic construct
  source 1..21: mol_type = other RNA
ttttaagcactattagagttg

SEQ ID NO: 8788 - RNA, 21 nt, synthetic construct
  source 1..21: mol_type = other RNA
ttttcaatctgcctaaatact

SEQ ID NO: 8789 - RNA, 21 nt, synthetic construct
  source 1..21: mol_type = other RNA
ttttcatgcttctccctcttc

SEQ ID NO: 8790 - RNA, 21 nt, synthetic construct
  source 1..21: mol_type = other RNA
ttttccatcccttaaatcctc

SEQ ID NO: 8791 - RNA, 21 nt, synthetic construct
  source 1..21: mol_type = other RNA
ttttcctaatatgtacttcac

SEQ ID NO: 8792 - RNA, 21 nt, synthetic construct
  source 1..21: mol_type = other RNA
ttttcggcttatataagctct

SEQ ID NO: 8793 - RNA, 21 nt, synthetic construct
  source 1..21: mol_type = other RNA
ttttgaaccctgtggtctcaa

SEQ ID NO: 8794 - RNA, 21 nt, synthetic construct
  source 1..21: mol_type = other RNA
ttttgaatgcttcctgacaat

SEQ ID NO: 8795 - RNA, 21 nt, synthetic construct
  source 1..21: mol_type = other RNA
ttttgaggaatctcagacgtt

SEQ ID NO: 8796 - RNA, 21 nt, synthetic construct
  source 1..21: mol_type = other RNA
ttttggatttatttcaggcaa

SEQ ID NO: 8797 - RNA, 21 nt, synthetic construct
  source 1..21: mol_type = other RNA
ttttggggactcatttcattc

SEQ ID NO: 8798 - RNA, 21 nt, synthetic construct
  source 1..21: mol_type = other RNA
tttttcatgcttctccctctt

SEQ ID NO: 8799 - RNA, 21 nt, synthetic construct
  source 1..21: mol_type = other RNA
tttttcggcttatataagctc

SEQ ID NO: 8800 - RNA, 22 nt, synthetic construct
  source 1..22: mol_type = other RNA
aaaaacgtctgagattcctcaa

SEQ ID NO: 8801 - RNA, 22 nt, synthetic construct
  source 1..22: mol_type = other RNA
aaaaagcagctaccaggtgttc

SEQ ID NO: 8802 - RNA, 22 nt, synthetic construct
  source 1..22: mol_type = other RNA
aaaaatcattgattgtcagcta

SEQ ID NO: 8803 - RNA, 22 nt, synthetic construct
  source 1..22: mol_type = other RNA
aaaacatcattagtagctgaca

SEQ ID NO: 8804 - RNA, 22 nt, synthetic construct
  source 1..22: mol_type = other RNA
aaaacatctctcttgcttatct

SEQ ID NO: 8805 - RNA, 22 nt, synthetic construct
  source 1..22: mol_type = other RNA
aaaacgtctgagattcctcaaa

SEQ ID NO: 8806 - RNA, 22 nt, synthetic construct
  source 1..22: mol_type = other RNA
aaaagcagctaccaggtgttct

SEQ ID NO: 8807 - RNA, 22 nt, synthetic construct
  source 1..22: mol_type = other RNA
aaaaggaagactagaggcttgc

SEQ ID NO: 8808 - RNA, 22 nt, synthetic construct
  source 1..22: mol_type = other RNA
aaaaggacaccttttaactcac

SEQ ID NO: 8809 - RNA, 22 nt, synthetic construct
  source 1..22: mol_type = other RNA
aaaaggagctttcaacaaggaa

SEQ ID NO: 8810 - RNA, 22 nt, synthetic construct
  source 1..22: mol_type = other RNA
aaaaggtgtccttttcaatctg

SEQ ID NO: 8811 - RNA, 22 nt, synthetic construct
  source 1..22: mol_type = other RNA
aaaatatgggttgcatttggtc

SEQ ID NO: 8812 - RNA, 22 nt, synthetic construct
  source 1..22: mol_type = other RNA
aaaatcattgattgtcagctac

SEQ ID NO: 8813 - RNA, 22 nt, synthetic construct
  source 1..22: mol_type = other RNA
aaaatcttgaccaaatgcaacc

SEQ ID NO: 8814 - RNA, 22 nt, synthetic construct
  source 1..22: mol_type = other RNA
aaaatgtctgtagctcctcaac

SEQ ID NO: 8815 - RNA, 22 nt, synthetic construct
  source 1..22: mol_type = other RNA
aaaattgaccagagagagctca

SEQ ID NO: 8816 - RNA, 22 nt, synthetic construct
  source 1..22: mol_type = other RNA
aaacatcattagtagctgacaa

SEQ ID NO: 8817 - RNA, 22 nt, synthetic construct
  source 1..22: mol_type = other RNA
aaacatctctcttgcttatctg

SEQ ID NO: 8818 - RNA, 22 nt, synthetic construct
  source 1..22: mol_type = other RNA
aaacattaggtgagttgaggag

SEQ ID NO: 8819 - RNA, 22 nt, synthetic construct
  source 1..22: mol_type = other RNA
aaacgtctgagattcctcaaaa

SEQ ID NO: 8820 - RNA, 22 nt, synthetic construct
  source 1..22: mol_type = other RNA
aaactaacagataagcaagaga

SEQ ID NO: 8821 - RNA, 22 nt, synthetic construct
  source 1..22: mol_type = other RNA
aaactgggctgtactttgtata

SEQ ID NO: 8822 - RNA, 22 nt, synthetic construct
  source 1..22: mol_type = other RNA
aaagaatcccaaagtgcttctc

SEQ ID NO: 8823 - RNA, 22 nt, synthetic construct
  source 1..22: mol_type = other RNA
aaagacagtcccccttgaggta

SEQ ID NO: 8824 - RNA, 22 nt, synthetic construct
  source 1..22: mol_type = other RNA
aaagagagaatgtagatattgt

SEQ ID NO: 8825 - RNA, 22 nt, synthetic construct
  source 1..22: mol_type = other RNA
aaagaggccaatgccccactgg

SEQ ID NO: 8826 - RNA, 22 nt, synthetic construct
  source 1..22: mol_type = other RNA
aaagaggctgaaagaggccaat

SEQ ID NO: 8827 - RNA, 22 nt, synthetic construct
  source 1..22: mol_type = other RNA
aaagcagctaccaggtgttcta

SEQ ID NO: 8828 - RNA, 22 nt, synthetic construct
  source 1..22: mol_type = other RNA
aaagcaggacaattccataggt

SEQ ID NO: 8829 - RNA, 22 nt, synthetic construct
  source 1..22: mol_type = other RNA
aaagctccttttggatttattt

SEQ ID NO: 8830 - RNA, 22 nt, synthetic construct
  source 1..22: mol_type = other RNA
aaaggaagactagaggcttgca

SEQ ID NO: 8831 - RNA, 22 nt, synthetic construct
  source 1..22: mol_type = other RNA
aaaggacaccttttaactcacc

SEQ ID NO: 8832 - RNA, 22 nt, synthetic construct
  source 1..22: mol_type = other RNA
aaaggagctttcaacaaggaat

SEQ ID NO: 8833 - RNA, 22 nt, synthetic construct
  source 1..22: mol_type = other RNA
aaaggtgtccttttcaatctgc

SEQ ID NO: 8834 - RNA, 22 nt, synthetic construct
  source 1..22: mol_type = other RNA
aaagtacagcccagtttcattg

SEQ ID NO: 8835 - RNA, 22 nt, synthetic construct
  source 1..22: mol_type = other RNA
aaagtatacttccggggtcaat

SEQ ID NO: 8836 - RNA, 22 nt, synthetic construct
  source 1..22: mol_type = other RNA
aaagtgcttctcttagagctta

SEQ ID NO: 8837 - RNA, 22 nt, synthetic construct
  source 1..22: mol_type = other RNA
aaataaatccaaaaggagcttt

SEQ ID NO: 8838 - RNA, 22 nt, synthetic construct
  source 1..22: mol_type = other RNA
aaatacacatgctgtgttagga

SEQ ID NO: 8839 - RNA, 22 nt, synthetic construct
  source 1..22: mol_type = other RNA
aaatactctcaggcactaagat

SEQ ID NO: 8840 - RNA, 22 nt, synthetic construct
  source 1..22: mol_type = other RNA
aaatatgggttgcatttggtca

SEQ ID NO: 8841 - RNA, 22 nt, synthetic construct
  source 1..22: mol_type = other RNA
aaatcattgattgtcagctact

SEQ ID NO: 8842 - RNA, 22 nt, synthetic construct
  source 1..22: mol_type = other RNA
aaatccaaaaggagctttcaac

SEQ ID NO: 8843 - RNA, 22 nt, synthetic construct
  source 1..22: mol_type = other RNA
aaatcctcaggtcacaaccatg

SEQ ID NO: 8844 - RNA, 22 nt, synthetic construct
  source 1..22: mol_type = other RNA
aaatcttgaccaaatgcaaccc

SEQ ID NO: 8845 - RNA, 22 nt, synthetic construct
  source 1..22: mol_type = other RNA
aaatgagtccccaaaacatctc

SEQ ID NO: 8846 - RNA, 22 nt, synthetic construct
  source 1..22: mol_type = other RNA
aaatgatcagcactggtaagat

SEQ ID NO: 8847 - RNA, 22 nt, synthetic construct
  source 1..22: mol_type = other RNA
aaatgcaacccatattttccta

SEQ ID NO: 8848 - RNA, 22 nt, synthetic construct
  source 1..22: mol_type = other RNA
aaatgcatatcctgagccatcg

SEQ ID NO: 8849 - RNA, 22 nt, synthetic construct
  source 1..22: mol_type = other RNA
aaatgcatgtaagaagaccctc

SEQ ID NO: 8850 - RNA, 22 nt, synthetic construct
  source 1..22: mol_type = other RNA
aaatggaggaatatgacggaag

SEQ ID NO: 8851 - RNA, 22 nt, synthetic construct
  source 1..22: mol_type = other RNA
aaatgtctgtagctcctcaact

SEQ ID NO: 8852 - RNA, 22 nt, synthetic construct
  source 1..22: mol_type = other RNA
aaattgaccagagagagctcag

SEQ ID NO: 8853 - RNA, 22 nt, synthetic construct
  source 1..22: mol_type = other RNA
aacaaagaatcataatggaaag

SEQ ID NO: 8854 - RNA, 22 nt, synthetic construct
  source 1..22: mol_type = other RNA
aacaacctgcccctgagccaca

SEQ ID NO: 8855 - RNA, 22 nt, synthetic construct
  source 1..22: mol_type = other RNA
aacacagcatgtgtatttccag

SEQ ID NO: 8856 - RNA, 22 nt, synthetic construct
  source 1..22: mol_type = other RNA
aacacctggtagctgctttttc

SEQ ID NO: 8857 - RNA, 22 nt, synthetic construct
  source 1..22: mol_type = other RNA
aacactgcccccaggtagctgc

SEQ ID NO: 8858 - RNA, 22 nt, synthetic construct
  source 1..22: mol_type = other RNA
aacagataagcaagagagatgt

SEQ ID NO: 8859 - RNA, 22 nt, synthetic construct
  source 1..22: mol_type = other RNA
aacatagaactctgggctgcca

SEQ ID NO: 8860 - RNA, 22 nt, synthetic construct
  source 1..22: mol_type = other RNA
aacatcattagtagctgacaat

SEQ ID NO: 8861 - RNA, 22 nt, synthetic construct
  source 1..22: mol_type = other RNA
aacatctctcttgcttatctgt

SEQ ID NO: 8862 - RNA, 22 nt, synthetic construct
  source 1..22: mol_type = other RNA
aacattaggtgagttgaggagc

SEQ ID NO: 8863 - RNA, 22 nt, synthetic construct
  source 1..22: mol_type = other RNA
aacattctcggtgcctgtaaca

SEQ ID NO: 8864 - RNA, 22 nt, synthetic construct
  source 1..22: mol_type = other RNA
aaccaagtggaccttgagacca

SEQ ID NO: 8865 - RNA, 22 nt, synthetic construct
  source 1..22: mol_type = other RNA
aaccatgtatctgaaagacagt

SEQ ID NO: 8866 - RNA, 22 nt, synthetic construct
  source 1..22: mol_type = other RNA
aacccatattttcctaatatgt

SEQ ID NO: 8867 - RNA, 22 nt, synthetic construct
  source 1..22: mol_type = other RNA
aaccctgtggtctcaaggtcca

SEQ ID NO: 8868 - RNA, 22 nt, synthetic construct
  source 1..22: mol_type = other RNA
aacctgcccctgagccacaagg

SEQ ID NO: 8869 - RNA, 22 nt, synthetic construct
  source 1..22: mol_type = other RNA
aacgtatctgagctctctctgg

SEQ ID NO: 8870 - RNA, 22 nt, synthetic construct
  source 1..22: mol_type = other RNA
aacgtctgagattcctcaaaat

SEQ ID NO: 8871 - RNA, 22 nt, synthetic construct
  source 1..22: mol_type = other RNA
aactaacagataagcaagagag

SEQ ID NO: 8872 - RNA, 22 nt, synthetic construct
  source 1..22: mol_type = other RNA
aactcaaggtccatgcctctgg

SEQ ID NO: 8873 - RNA, 22 nt, synthetic construct
  source 1..22: mol_type = other RNA
aactcacctaatgtttatgagc

SEQ ID NO: 8874 - RNA, 22 nt, synthetic construct
  source 1..22: mol_type = other RNA
aactcacctctcaaggtgggcc

SEQ ID NO: 8875 - RNA, 22 nt, synthetic construct
  source 1..22: mol_type = other RNA
aactctaagtatccccaggatc

SEQ ID NO: 8876 - RNA, 22 nt, synthetic construct
  source 1..22: mol_type = other RNA
aactctgggctgccatgtgaag

SEQ ID NO: 8877 - RNA, 22 nt, synthetic construct
  source 1..22: mol_type = other RNA
aactgggctgtactttgtatat

SEQ ID NO: 8878 - RNA, 22 nt, synthetic construct
  source 1..22: mol_type = other RNA
aagaacatagaactctgggctg

SEQ ID NO: 8879 - RNA, 22 nt, synthetic construct
  source 1..22: mol_type = other RNA
aagaagacatgaaccaagtgga

SEQ ID NO: 8880 - RNA, 22 nt, synthetic construct
  source 1..22: mol_type = other RNA
aagaagaccctcactgaataca

SEQ ID NO: 8881 - RNA, 22 nt, synthetic construct
  source 1..22: mol_type = other RNA
aagaagggtggccttgtgatca

SEQ ID NO: 8882 - RNA, 22 nt, synthetic construct
  source 1..22: mol_type = other RNA
aagaatcataatggaaagaatc

SEQ ID NO: 8883 - RNA, 22 nt, synthetic construct
  source 1..22: mol_type = other RNA
aagaatcccaaagtgcttctct

SEQ ID NO: 8884 - RNA, 22 nt, synthetic construct
  source 1..22: mol_type = other RNA
aagacacctatggaattgtcct

SEQ ID NO: 8885 - RNA, 22 nt, synthetic construct
  source 1..22: mol_type = other RNA
aagacagtcccccttgaggtag

SEQ ID NO: 8886 - RNA, 22 nt, synthetic construct
  source 1..22: mol_type = other RNA
aagacatgaaccaagtggacct

SEQ ID NO: 8887 - RNA, 22 nt, synthetic construct
  source 1..22: mol_type = other RNA
aagaccctcactgaatacaaca

SEQ ID NO: 8888 - RNA, 22 nt, synthetic construct
  source 1..22: mol_type = other RNA
aagactagaggcttgcataata

SEQ ID NO: 8889 - RNA, 22 nt, synthetic construct
  source 1..22: mol_type = other RNA
aagagaagcactttgggattct

SEQ ID NO: 8890 - RNA, 22 nt, synthetic construct
  source 1..22: mol_type = other RNA
aagagagaatgtagatattgtg

SEQ ID NO: 8891 - RNA, 22 nt, synthetic construct
  source 1..22: mol_type = other RNA
aagagagatgttttggggactc

SEQ ID NO: 8892 - RNA, 22 nt, synthetic construct
  source 1..22: mol_type = other RNA
aagaggccaatgccccactggc

SEQ ID NO: 8893 - RNA, 22 nt, synthetic construct
  source 1..22: mol_type = other RNA
aagaggctgaaagaggccaatg

SEQ ID NO: 8894 - RNA, 22 nt, synthetic construct
  source 1..22: mol_type = other RNA
aagagggagaagcatgaaaaag

SEQ ID NO: 8895 - RNA, 22 nt, synthetic construct
  source 1..22: mol_type = other RNA
aagatgagtgtagaacacctgg

SEQ ID NO: 8896 - RNA, 22 nt, synthetic construct
  source 1..22: mol_type = other RNA
aagatgatgagctactgcacta

SEQ ID NO: 8897 - RNA, 22 nt, synthetic construct
  source 1..22: mol_type = other RNA
aagatgctgccagtggggcatt

SEQ ID NO: 8898 - RNA, 22 nt, synthetic construct
  source 1..22: mol_type = other RNA
aagattgaacactgcccccagg

SEQ ID NO: 8899 - RNA, 22 nt, synthetic construct
  source 1..22: mol_type = other RNA
aagattgaccccggaagtatac

SEQ ID NO: 8900 - RNA, 22 nt, synthetic construct
  source 1..22: mol_type = other RNA
aagattttgaatgcttcctgac

SEQ ID NO: 8901 - RNA, 22 nt, synthetic construct
  source 1..22: mol_type = other RNA
aagcaagagagatgttttgggg

SEQ ID NO: 8902 - RNA, 22 nt, synthetic construct
  source 1..22: mol_type = other RNA
aagcactattagagttgattgt

SEQ ID NO: 8903 - RNA, 22 nt, synthetic construct
  source 1..22: mol_type = other RNA
aagcactttgggattctttcca

SEQ ID NO: 8904 - RNA, 22 nt, synthetic construct
  source 1..22: mol_type = other RNA
aagcagctaccaggtgttctac

SEQ ID NO: 8905 - RNA, 22 nt, synthetic construct
  source 1..22: mol_type = other RNA
aagcaggacaattccataggtg

SEQ ID NO: 8906 - RNA, 22 nt, synthetic construct
  source 1..22: mol_type = other RNA
aagcatgaaaaagcagctacca

SEQ ID NO: 8907 - RNA, 22 nt, synthetic construct
  source 1..22: mol_type = other RNA
aagcattcaaaatcttgaccaa

SEQ ID NO: 8908 - RNA, 22 nt, synthetic construct
  source 1..22: mol_type = other RNA
aagccgaaaaacgtctgagatt

SEQ ID NO: 8909 - RNA, 22 nt, synthetic construct
  source 1..22: mol_type = other RNA
aagcctctagtcttccttttcc

SEQ ID NO: 8910 - RNA, 22 nt, synthetic construct
  source 1..22: mol_type = other RNA
aagctaaagaggctgaaagagg

SEQ ID NO: 8911 - RNA, 22 nt, synthetic construct
  source 1..22: mol_type = other RNA
aagctccttttggatttatttc

SEQ ID NO: 8912 - RNA, 22 nt, synthetic construct
  source 1..22: mol_type = other RNA
aagctctaagagaagcactttg

SEQ ID NO: 8913 - RNA, 22 nt, synthetic construct
  source 1..22: mol_type = other RNA
aaggaagactagaggcttgcat

SEQ ID NO: 8914 - RNA, 22 nt, synthetic construct
  source 1..22: mol_type = other RNA
aaggacaccttttaactcacct

SEQ ID NO: 8915 - RNA, 22 nt, synthetic construct
  source 1..22: mol_type = other RNA
aaggagctttcaacaaggaata

SEQ ID NO: 8916 - RNA, 22 nt, synthetic construct
  source 1..22: mol_type = other RNA
aaggccacccttcttatacttc

SEQ ID NO: 8917 - RNA, 22 nt, synthetic construct
  source 1..22: mol_type = other RNA
aaggcccaccttgagaggtgag

SEQ ID NO: 8918 - RNA, 22 nt, synthetic construct
  source 1..22: mol_type = other RNA
aagggatggaaaaggaagacta

SEQ ID NO: 8919 - RNA, 22 nt, synthetic construct
  source 1..22: mol_type = other RNA
aagggggactgtctttcagata

SEQ ID NO: 8920 - RNA, 22 nt, synthetic construct
  source 1..22: mol_type = other RNA
aagggtggccttgtgatcaatg

SEQ ID NO: 8921 - RNA, 22 nt, synthetic construct
  source 1..22: mol_type = other RNA
aaggtccacttggttcatgtct

SEQ ID NO: 8922 - RNA, 22 nt, synthetic construct
  source 1..22: mol_type = other RNA
aaggtccatgcctctggaatgg

SEQ ID NO: 8923 - RNA, 22 nt, synthetic construct
  source 1..22: mol_type = other RNA
aaggtctacatgaggaactcta

SEQ ID NO: 8924 - RNA, 22 nt, synthetic construct
  source 1..22: mol_type = other RNA
aaggtgggccttgctacctcaa

SEQ ID NO: 8925 - RNA, 22 nt, synthetic construct
  source 1..22: mol_type = other RNA
aaggtgtccttttcaatctgcc

SEQ ID NO: 8926 - RNA, 22 nt, synthetic construct
  source 1..22: mol_type = other RNA
aagtaagaagacatgaaccaag

SEQ ID NO: 8927 - RNA, 22 nt, synthetic construct
  source 1..22: mol_type = other RNA
aagtacagcccagtttcattga

SEQ ID NO: 8928 - RNA, 22 nt, synthetic construct
  source 1..22: mol_type = other RNA
aagtataagaagggtggccttg

SEQ ID NO: 8929 - RNA, 22 nt, synthetic construct
  source 1..22: mol_type = other RNA
aagtatacttccggggtcaatc

SEQ ID NO: 8930 - RNA, 22 nt, synthetic construct
  source 1..22: mol_type = other RNA
aagtatccccaggatctggtga

SEQ ID NO: 8931 - RNA, 22 nt, synthetic construct
  source 1..22: mol_type = other RNA
aagtccaactcaaggtccatgc

SEQ ID NO: 8932 - RNA, 22 nt, synthetic construct
  source 1..22: mol_type = other RNA
aagtgaagatgctgccagtggg

SEQ ID NO: 8933 - RNA, 22 nt, synthetic construct
  source 1..22: mol_type = other RNA
aagtgcttctcttagagcttat

SEQ ID NO: 8934 - RNA, 22 nt, synthetic construct
  source 1..22: mol_type = other RNA
aagtggaccttgagaccacagg

SEQ ID NO: 8935 - RNA, 22 nt, synthetic construct
  source 1..22: mol_type = other RNA
aataaatccaaaaggagctttc

SEQ ID NO: 8936 - RNA, 22 nt, synthetic construct
  source 1..22: mol_type = other RNA
aataagctaaagaggctgaaag

SEQ ID NO: 8937 - RNA, 22 nt, synthetic construct
  source 1..22: mol_type = other RNA
aatacaacattctcggtgcctg

SEQ ID NO: 8938 - RNA, 22 nt, synthetic construct
  source 1..22: mol_type = other RNA
aatacacatgctgtgttaggaa

SEQ ID NO: 8939 - RNA, 22 nt, synthetic construct
  source 1..22: mol_type = other RNA
aatactctcaggcactaagatg

SEQ ID NO: 8940 - RNA, 22 nt, synthetic construct
  source 1..22: mol_type = other RNA
aatatacaaagtacagcccagt

SEQ ID NO: 8941 - RNA, 22 nt, synthetic construct
  source 1..22: mol_type = other RNA
aatatctacattctctctttag

SEQ ID NO: 8942 - RNA, 22 nt, synthetic construct
  source 1..22: mol_type = other RNA
aatatgacggaagaacatagaa

SEQ ID NO: 8943 - RNA, 22 nt, synthetic construct
  source 1..22: mol_type = other RNA
aatatgggttgcatttggtcaa

SEQ ID NO: 8944 - RNA, 22 nt, synthetic construct
  source 1..22: mol_type = other RNA
aatcaactctaatagtgcttaa

SEQ ID NO: 8945 - RNA, 22 nt, synthetic construct
  source 1..22: mol_type = other RNA
aatcataatggaaagaatccca

SEQ ID NO: 8946 - RNA, 22 nt, synthetic construct
  source 1..22: mol_type = other RNA
aatcattgattgtcagctacta

SEQ ID NO: 8947 - RNA, 22 nt, synthetic construct
  source 1..22: mol_type = other RNA
aatccaaaaggagctttcaaca

SEQ ID NO: 8948 - RNA, 22 nt, synthetic construct
  source 1..22: mol_type = other RNA
aatcccaaagtgcttctcttag

SEQ ID NO: 8949 - RNA, 22 nt, synthetic construct
  source 1..22: mol_type = other RNA
aatcctcaggtcacaaccatgt

SEQ ID NO: 8950 - RNA, 22 nt, synthetic construct
  source 1..22: mol_type = other RNA
aatctcagacgtttttcggctt

SEQ ID NO: 8951 - RNA, 22 nt, synthetic construct
  source 1..22: mol_type = other RNA
aatctgcctaaatactctcagg

SEQ ID NO: 8952 - RNA, 22 nt, synthetic construct
  source 1..22: mol_type = other RNA
aatcttaccagtgctgatcatt

SEQ ID NO: 8953 - RNA, 22 nt, synthetic construct
  source 1..22: mol_type = other RNA
aatcttgaccaaatgcaaccca

SEQ ID NO: 8954 - RNA, 22 nt, synthetic construct
  source 1..22: mol_type = other RNA
aatcttgcaacaacctgcccct

SEQ ID NO: 8955 - RNA, 22 nt, synthetic construct
  source 1..22: mol_type = other RNA
aatgaaactgggctgtactttg

SEQ ID NO: 8956 - RNA, 22 nt, synthetic construct
  source 1..22: mol_type = other RNA
aatgaaatgagtccccaaaaca

SEQ ID NO: 8957 - RNA, 22 nt, synthetic construct
  source 1..22: mol_type = other RNA
aatgagtccccaaaacatctct

SEQ ID NO: 8958 - RNA, 22 nt, synthetic construct
  source 1..22: mol_type = other RNA
aatgatcagcactggtaagatt

SEQ ID NO: 8959 - RNA, 22 nt, synthetic construct
  source 1..22: mol_type = other RNA
aatgcaacccatattttcctaa

SEQ ID NO: 8960 - RNA, 22 nt, synthetic construct
  source 1..22: mol_type = other RNA
aatgcatatcctgagccatcgg

SEQ ID NO: 8961 - RNA, 22 nt, synthetic construct
  source 1..22: mol_type = other RNA
aatgcatgtaagaagaccctca

SEQ ID NO: 8962 - RNA, 22 nt, synthetic construct
  source 1..22: mol_type = other RNA
aatgccccactggcagcatctt

SEQ ID NO: 8963 - RNA, 22 nt, synthetic construct
  source 1..22: mol_type = other RNA
aatgcttcctgacaatcaactc

SEQ ID NO: 8964 - RNA, 22 nt, synthetic construct
  source 1..22: mol_type = other RNA
aatggaaagaatcccaaagtgc

SEQ ID NO: 8965 - RNA, 22 nt, synthetic construct
  source 1..22: mol_type = other RNA
aatggaggaatatgacggaaga

SEQ ID NO: 8966 - RNA, 22 nt, synthetic construct
  source 1..22: mol_type = other RNA
aatgggaagacacctatggaat

SEQ ID NO: 8967 - RNA, 22 nt, synthetic construct
  source 1..22: mol_type = other RNA
aatgtagatattgtgaagtaca

SEQ ID NO: 8968 - RNA, 22 nt, synthetic construct
  source 1..22: mol_type = other RNA
aatgtctgtagctcctcaactc

SEQ ID NO: 8969 - RNA, 22 nt, synthetic construct
  source 1..22: mol_type = other RNA
aatgttgtattcagtgagggtc

SEQ ID NO: 8970 - RNA, 22 nt, synthetic construct
  source 1..22: mol_type = other RNA
aatgtttatgagccagacaaat

SEQ ID NO: 8971 - RNA, 22 nt, synthetic construct
  source 1..22: mol_type = other RNA
aattccataggtgtcttcccat

SEQ ID NO: 8972 - RNA, 22 nt, synthetic construct
  source 1..22: mol_type = other RNA
aattgaccagagagagctcaga

SEQ ID NO: 8973 - RNA, 22 nt, synthetic construct
  source 1..22: mol_type = other RNA
aattgcactggaaatacacatg

SEQ ID NO: 8974 - RNA, 22 nt, synthetic construct
  source 1..22: mol_type = other RNA
aattgtcctgctttctggagtg

SEQ ID NO: 8975 - RNA, 22 nt, synthetic construct
  source 1..22: mol_type = other RNA
aattttgaggaatctcagacgt

SEQ ID NO: 8976 - RNA, 22 nt, synthetic construct
  source 1..22: mol_type = other RNA
acaaaaatgcacatctacataa

SEQ ID NO: 8977 - RNA, 22 nt, synthetic construct
  source 1..22: mol_type = other RNA
acaaagaatcataatggaaaga

SEQ ID NO: 8978 - RNA, 22 nt, synthetic construct
  source 1..22: mol_type = other RNA
acaaagtacagcccagtttcat

SEQ ID NO: 8979 - RNA, 22 nt, synthetic construct
  source 1..22: mol_type = other RNA
acaaatggaggaatatgacgga

SEQ ID NO: 8980 - RNA, 22 nt, synthetic construct
  source 1..22: mol_type = other RNA
acaacattctcggtgcctgtaa

SEQ ID NO: 8981 - RNA, 22 nt, synthetic construct
  source 1..22: mol_type = other RNA
acaaccatgtatctgaaagaca

SEQ ID NO: 8982 - RNA, 22 nt, synthetic construct
  source 1..22: mol_type = other RNA
acaacctgcccctgagccacaa

SEQ ID NO: 8983 - RNA, 22 nt, synthetic construct
  source 1..22: mol_type = other RNA
acaaggccacccttcttatact

SEQ ID NO: 8984 - RNA, 22 nt, synthetic construct
  source 1..22: mol_type = other RNA
acaaggtctacatgaggaactc

SEQ ID NO: 8985 - RNA, 22 nt, synthetic construct
  source 1..22: mol_type = other RNA
acaatatctacattctctcttt

SEQ ID NO: 8986 - RNA, 22 nt, synthetic construct
  source 1..22: mol_type = other RNA
acaatcaactctaatagtgctt

SEQ ID NO: 8987 - RNA, 22 nt, synthetic construct
  source 1..22: mol_type = other RNA
acaatcaatgatttttaagcac

SEQ ID NO: 8988 - RNA, 22 nt, synthetic construct
  source 1..22: mol_type = other RNA
acaattccataggtgtcttccc

SEQ ID NO: 8989 - RNA, 22 nt, synthetic construct
  source 1..22: mol_type = other RNA
acaattgcactggaaatacaca

SEQ ID NO: 8990 - RNA, 22 nt, synthetic construct
  source 1..22: mol_type = other RNA
acacacacacccctacaattgc

SEQ ID NO: 8991 - RNA, 22 nt, synthetic construct
  source 1..22: mol_type = other RNA
acacacacccctacaattgcac

SEQ ID NO: 8992 - RNA, 22 nt, synthetic construct
  source 1..22: mol_type = other RNA
acacacccctacaattgcactg

SEQ ID NO: 8993 - RNA, 22 nt, synthetic construct
  source 1..22: mol_type = other RNA
acacagcatgtgtatttccagt

SEQ ID NO: 8994 - RNA, 22 nt, synthetic construct
  source 1..22: mol_type = other RNA
acacatgctgtgttaggaatga

SEQ ID NO: 8995 - RNA, 22 nt, synthetic construct
  source 1..22: mol_type = other RNA
acacccctacaattgcactgga

SEQ ID NO: 8996 - RNA, 22 nt, synthetic construct
  source 1..22: mol_type = other RNA
acacctatggaattgtcctgct

SEQ ID NO: 8997 - RNA, 22 nt, synthetic construct
  source 1..22: mol_type = other RNA
acacctggtagctgctttttca

SEQ ID NO: 8998 - RNA, 22 nt, synthetic construct
  source 1..22: mol_type = other RNA
acaccttttaactcacctctca

SEQ ID NO: 8999 - RNA, 22 nt, synthetic construct
  source 1..22: mol_type = other RNA
acactcatcttagtgcctgaga

SEQ ID NO: 9000 - RNA, 22 nt, synthetic construct
  source 1..22: mol_type = other RNA
acactgcccccaggtagctgct

SEQ ID NO: 9001 - RNA, 22 nt, synthetic construct
  source 1..22: mol_type = other RNA
acagacattttgaaccctgtgg

SEQ ID NO: 9002 - RNA, 22 nt, synthetic construct
  source 1..22: mol_type = other RNA
acagataagcaagagagatgtt

SEQ ID NO: 9003 - RNA, 22 nt, synthetic construct
  source 1..22: mol_type = other RNA
acagcatgtgtatttccagtgc

SEQ ID NO: 9004 - RNA, 22 nt, synthetic construct
  source 1..22: mol_type = other RNA
acagcccagtttcattgatcac

SEQ ID NO: 9005 - RNA, 22 nt, synthetic construct
  source 1..22: mol_type = other RNA
acaggcaccgagaatgttgtat

SEQ ID NO: 9006 - RNA, 22 nt, synthetic construct
  source 1..22: mol_type = other RNA
acagggttcaaaatgtctgtag

SEQ ID NO: 9007 - RNA, 22 nt, synthetic construct
  source 1..22: mol_type = other RNA
acagtcccccttgaggtagcaa

SEQ ID NO: 9008 - RNA, 22 nt, synthetic construct
  source 1..22: mol_type = other RNA
acatagaactctgggctgccat

SEQ ID NO: 9009 - RNA, 22 nt, synthetic construct
  source 1..22: mol_type = other RNA
acatataaatgatcagcactgg

SEQ ID NO: 9010 - RNA, 22 nt, synthetic construct
  source 1..22: mol_type = other RNA
acatattaggaaaatatgggtt

SEQ ID NO: 9011 - RNA, 22 nt, synthetic construct
  source 1..22: mol_type = other RNA
acatcattagtagctgacaatc

SEQ ID NO: 9012 - RNA, 22 nt, synthetic construct
  source 1..22: mol_type = other RNA
acatctctcttgcttatctgtt

SEQ ID NO: 9013 - RNA, 22 nt, synthetic construct
  source 1..22: mol_type = other RNA
acatctgcccagtagtgcagta

SEQ ID NO: 9014 - RNA, 22 nt, synthetic construct
  source 1..22: mol_type = other RNA
acatgaaccaagtggaccttga

SEQ ID NO: 9015 - RNA, 22 nt, synthetic construct
  source 1..22: mol_type = other RNA
acatgaggaactctaagtatcc

SEQ ID NO: 9016 - RNA, 22 nt, synthetic construct
  source 1..22: mol_type = other RNA
acatgcatttgaggtcaagtaa

SEQ ID NO: 9017 - RNA, 22 nt, synthetic construct
  source 1..22: mol_type = other RNA
acatgctgtgttaggaatgaaa

SEQ ID NO: 9018 - RNA, 22 nt, synthetic construct
  source 1..22: mol_type = other RNA
acatggcagcccagagttctat

SEQ ID NO: 9019 - RNA, 22 nt, synthetic construct
  source 1..22: mol_type = other RNA
acatggttgtgacctgaggatt

SEQ ID NO: 9020 - RNA, 22 nt, synthetic construct
  source 1..22: mol_type = other RNA
acattaggtgagttgaggagct

SEQ ID NO: 9021 - RNA, 22 nt, synthetic construct
  source 1..22: mol_type = other RNA
acattctcggtgcctgtaacaa

SEQ ID NO: 9022 - RNA, 22 nt, synthetic construct
  source 1..22: mol_type = other RNA
acattctctctttagtcataca

SEQ ID NO: 9023 - RNA, 22 nt, synthetic construct
  source 1..22: mol_type = other RNA
acattttgaaccctgtggtctc

SEQ ID NO: 9024 - RNA, 22 nt, synthetic construct
  source 1..22: mol_type = other RNA
accaaatgcaacccatattttc

SEQ ID NO: 9025 - RNA, 22 nt, synthetic construct
  source 1..22: mol_type = other RNA
accaagtggaccttgagaccac

SEQ ID NO: 9026 - RNA, 22 nt, synthetic construct
  source 1..22: mol_type = other RNA
accacagggttcaaaatgtctg

SEQ ID NO: 9027 - RNA, 22 nt, synthetic construct
  source 1..22: mol_type = other RNA
accagagagagctcagatacgt

SEQ ID NO: 9028 - RNA, 22 nt, synthetic construct
  source 1..22: mol_type = other RNA
accagatcctggggatacttag

SEQ ID NO: 9029 - RNA, 22 nt, synthetic construct
  source 1..22: mol_type = other RNA
accaggtgttctacactcatct

SEQ ID NO: 9030 - RNA, 22 nt, synthetic construct
  source 1..22: mol_type = other RNA
accagtgctgatcatttatatg

SEQ ID NO: 9031 - RNA, 22 nt, synthetic construct
  source 1..22: mol_type = other RNA
accatgtatctgaaagacagtc

SEQ ID NO: 9032 - RNA, 22 nt, synthetic construct
  source 1..22: mol_type = other RNA
acccatattttcctaatatgta

SEQ ID NO: 9033 - RNA, 22 nt, synthetic construct
  source 1..22: mol_type = other RNA
accccggaagtatactttggaa

SEQ ID NO: 9034 - RNA, 22 nt, synthetic construct
  source 1..22: mol_type = other RNA
acccctacaattgcactggaaa

SEQ ID NO: 9035 - RNA, 22 nt, synthetic construct
  source 1..22: mol_type = other RNA
accctcactgaatacaacattc

SEQ ID NO: 9036 - RNA, 22 nt, synthetic construct
  source 1..22: mol_type = other RNA
accctgtggtctcaaggtccac

SEQ ID NO: 9037 - RNA, 22 nt, synthetic construct
  source 1..22: mol_type = other RNA
acccttcttatacttcactcca

SEQ ID NO: 9038 - RNA, 22 nt, synthetic construct
  source 1..22: mol_type = other RNA
accgagaatgttgtattcagtg

SEQ ID NO: 9039 - RNA, 22 nt, synthetic construct
  source 1..22: mol_type = other RNA
accgatggctcaggatatgcat

SEQ ID NO: 9040 - RNA, 22 nt, synthetic construct
  source 1..22: mol_type = other RNA
acctaatgtttatgagccagac

SEQ ID NO: 9041 - RNA, 22 nt, synthetic construct
  source 1..22: mol_type = other RNA
acctatggaattgtcctgcttt

SEQ ID NO: 9042 - RNA, 22 nt, synthetic construct
  source 1..22: mol_type = other RNA
acctcaaatgcatgtaagaaga

SEQ ID NO: 9043 - RNA, 22 nt, synthetic construct
  source 1..22: mol_type = other RNA
acctcaagggggactgtctttc

SEQ ID NO: 9044 - RNA, 22 nt, synthetic construct
  source 1..22: mol_type = other RNA
acctctcaaggtgggccttgct

SEQ ID NO: 9045 - RNA, 22 nt, synthetic construct
  source 1..22: mol_type = other RNA
acctgaggatttaagggatgga

SEQ ID NO: 9046 - RNA, 22 nt, synthetic construct
  source 1..22: mol_type = other RNA
acctgcccctgagccacaaggt

SEQ ID NO: 9047 - RNA, 22 nt, synthetic construct
  source 1..22: mol_type = other RNA
acctgggggcagtgttcaatct

SEQ ID NO: 9048 - RNA, 22 nt, synthetic construct
  source 1..22: mol_type = other RNA
acctggtagctgctttttcatg

SEQ ID NO: 9049 - RNA, 22 nt, synthetic construct
  source 1..22: mol_type = other RNA
accttgagaccacagggttcaa

SEQ ID NO: 9050 - RNA, 22 nt, synthetic construct
  source 1..22: mol_type = other RNA
accttgagaggtgagttaaaag

SEQ ID NO: 9051 - RNA, 22 nt, synthetic construct
  source 1..22: mol_type = other RNA
accttgagttggacttgcctga

SEQ ID NO: 9052 - RNA, 22 nt, synthetic construct
  source 1..22: mol_type = other RNA
accttgtggctcaggggcaggt

SEQ ID NO: 9053 - RNA, 22 nt, synthetic construct
  source 1..22: mol_type = other RNA
accttttaactcacctctcaag

SEQ ID NO: 9054 - RNA, 22 nt, synthetic construct
  source 1..22: mol_type = other RNA
acggaagaacatagaactctgg

SEQ ID NO: 9055 - RNA, 22 nt, synthetic construct
  source 1..22: mol_type = other RNA
acgtatctgagctctctctggt

SEQ ID NO: 9056 - RNA, 22 nt, synthetic construct
  source 1..22: mol_type = other RNA
acgtctgagattcctcaaaatt

SEQ ID NO: 9057 - RNA, 22 nt, synthetic construct
  source 1..22: mol_type = other RNA
acgttgacatataaatgatcag

SEQ ID NO: 9058 - RNA, 22 nt, synthetic construct
  source 1..22: mol_type = other RNA
acgtttttcggcttatataagc

SEQ ID NO: 9059 - RNA, 22 nt, synthetic construct
  source 1..22: mol_type = other RNA
actaaagagagaatgtagatat

SEQ ID NO: 9060 - RNA, 22 nt, synthetic construct
  source 1..22: mol_type = other RNA
actaacagataagcaagagaga

SEQ ID NO: 9061 - RNA, 22 nt, synthetic construct
  source 1..22: mol_type = other RNA
actaagatgagtgtagaacacc

SEQ ID NO: 9062 - RNA, 22 nt, synthetic construct
  source 1..22: mol_type = other RNA
actactgggcagatgtgggccc

SEQ ID NO: 9063 - RNA, 22 nt, synthetic construct
  source 1..22: mol_type = other RNA
actagaggcttgcataataagc

SEQ ID NO: 9064 - RNA, 22 nt, synthetic construct
  source 1..22: mol_type = other RNA
actattagagttgattgtcagg

SEQ ID NO: 9065 - RNA, 22 nt, synthetic construct
  source 1..22: mol_type = other RNA
actattccttgttgaaagctcc

SEQ ID NO: 9066 - RNA, 22 nt, synthetic construct
  source 1..22: mol_type = other RNA
actcaaggtccatgcctctgga

SEQ ID NO: 9067 - RNA, 22 nt, synthetic construct
  source 1..22: mol_type = other RNA
actcacctaatgtttatgagcc

SEQ ID NO: 9068 - RNA, 22 nt, synthetic construct
  source 1..22: mol_type = other RNA
actcacctctcaaggtgggcct

SEQ ID NO: 9069 - RNA, 22 nt, synthetic construct
  source 1..22: mol_type = other RNA
actcatcttagtgcctgagagt

SEQ ID NO: 9070 - RNA, 22 nt, synthetic construct
  source 1..22: mol_type = other RNA
actcatttcattcctaacacag

SEQ ID NO: 9071 - RNA, 22 nt, synthetic construct
  source 1..22: mol_type = other RNA
actccagaaagcaggacaattc

SEQ ID NO: 9072 - RNA, 22 nt, synthetic construct
  source 1..22: mol_type = other RNA
actctaagtatccccaggatct

SEQ ID NO: 9073 - RNA, 22 nt, synthetic construct
  source 1..22: mol_type = other RNA
actctaatagtgcttaaaaatc

SEQ ID NO: 9074 - RNA, 22 nt, synthetic construct
  source 1..22: mol_type = other RNA
actctcaggcactaagatgagt

SEQ ID NO: 9075 - RNA, 22 nt, synthetic construct
  source 1..22: mol_type = other RNA
actctgggctgccatgtgaaga

SEQ ID NO: 9076 - RNA, 22 nt, synthetic construct
  source 1..22: mol_type = other RNA
actgaatacaacattctcggtg

SEQ ID NO: 9077 - RNA, 22 nt, synthetic construct
  source 1..22: mol_type = other RNA
actgcactactgggcagatgtg

SEQ ID NO: 9078 - RNA, 22 nt, synthetic construct
  source 1..22: mol_type = other RNA
actgcccccaggtagctgctgc

SEQ ID NO: 9079 - RNA, 22 nt, synthetic construct
  source 1..22: mol_type = other RNA
actggaaatacacatgctgtgt

SEQ ID NO: 9080 - RNA, 22 nt, synthetic construct
  source 1..22: mol_type = other RNA
actggcagcatcttcacttcta

SEQ ID NO: 9081 - RNA, 22 nt, synthetic construct
  source 1..22: mol_type = other RNA
actgggcagatgtgggcccgca

SEQ ID NO: 9082 - RNA, 22 nt, synthetic construct
  source 1..22: mol_type = other RNA
actgggctgtactttgtatatt

SEQ ID NO: 9083 - RNA, 22 nt, synthetic construct
  source 1..22: mol_type = other RNA
actggtaagattgaacactgcc

SEQ ID NO: 9084 - RNA, 22 nt, synthetic construct
  source 1..22: mol_type = other RNA
actgtctttcagatacatggtt

SEQ ID NO: 9085 - RNA, 22 nt, synthetic construct
  source 1..22: mol_type = other RNA
acttagagttcctcatgtagac

SEQ ID NO: 9086 - RNA, 22 nt, synthetic construct
  source 1..22: mol_type = other RNA
acttcacaatatctacattctc

SEQ ID NO: 9087 - RNA, 22 nt, synthetic construct
  source 1..22: mol_type = other RNA
acttcactccagaaagcaggac

SEQ ID NO: 9088 - RNA, 22 nt, synthetic construct
  source 1..22: mol_type = other RNA
acttccggggtcaatcttgcaa

SEQ ID NO: 9089 - RNA, 22 nt, synthetic construct
  source 1..22: mol_type = other RNA
acttctaaatgcatatcctgag

SEQ ID NO: 9090 - RNA, 22 nt, synthetic construct
  source 1..22: mol_type = other RNA
acttgacctcaaatgcatgtaa

SEQ ID NO: 9091 - RNA, 22 nt, synthetic construct
  source 1..22: mol_type = other RNA
acttgcctgaaataaatccaaa

SEQ ID NO: 9092 - RNA, 22 nt, synthetic construct
  source 1..22: mol_type = other RNA
acttggttcatgtcttcttact

SEQ ID NO: 9093 - RNA, 22 nt, synthetic construct
  source 1..22: mol_type = other RNA
actttggaatatacaaagtaca

SEQ ID NO: 9094 - RNA, 22 nt, synthetic construct
  source 1..22: mol_type = other RNA
actttgggattctttccattat

SEQ ID NO: 9095 - RNA, 22 nt, synthetic construct
  source 1..22: mol_type = other RNA
agaaagcaggacaattccatag

SEQ ID NO: 9096 - RNA, 22 nt, synthetic construct
  source 1..22: mol_type = other RNA
agaacacctggtagctgctttt

SEQ ID NO: 9097 - RNA, 22 nt, synthetic construct
  source 1..22: mol_type = other RNA
agaacatagaactctgggctgc

SEQ ID NO: 9098 - RNA, 22 nt, synthetic construct
  source 1..22: mol_type = other RNA
agaactctgggctgccatgtga

SEQ ID NO: 9099 - RNA, 22 nt, synthetic construct
  source 1..22: mol_type = other RNA
agaagacatgaaccaagtggac

SEQ ID NO: 9100 - RNA, 22 nt, synthetic construct
  source 1..22: mol_type = other RNA
agaagaccctcactgaatacaa

SEQ ID NO: 9101 - RNA, 22 nt, synthetic construct
  source 1..22: mol_type = other RNA
agaagcactttgggattctttc

SEQ ID NO: 9102 - RNA, 22 nt, synthetic construct
  source 1..22: mol_type = other RNA
agaagcatgaaaaagcagctac

SEQ ID NO: 9103 - RNA, 22 nt, synthetic construct
  source 1..22: mol_type = other RNA
agaagggtggccttgtgatcaa

SEQ ID NO: 9104 - RNA, 22 nt, synthetic construct
  source 1..22: mol_type = other RNA
agaagtgaagatgctgccagtg

SEQ ID NO: 9105 - RNA, 22 nt, synthetic construct
  source 1..22: mol_type = other RNA
agaatcataatggaaagaatcc

SEQ ID NO: 9106 - RNA, 22 nt, synthetic construct
  source 1..22: mol_type = other RNA
agaatcccaaagtgcttctctt

SEQ ID NO: 9107 - RNA, 22 nt, synthetic construct
  source 1..22: mol_type = other RNA
agaatgtagatattgtgaagta

SEQ ID NO: 9108 - RNA, 22 nt, synthetic construct
  source 1..22: mol_type = other RNA
agaatgttgtattcagtgaggg

SEQ ID NO: 9109 - RNA, 22 nt, synthetic construct
  source 1..22: mol_type = other RNA
agacaaatggaggaatatgacg

SEQ ID NO: 9110 - RNA, 22 nt, synthetic construct
  source 1..22: mol_type = other RNA
agacacctatggaattgtcctg

SEQ ID NO: 9111 - RNA, 22 nt, synthetic construct
  source 1..22: mol_type = other RNA
agacagtcccccttgaggtagc

SEQ ID NO: 9112 - RNA, 22 nt, synthetic construct
  source 1..22: mol_type = other RNA
agacatgaaccaagtggacctt

SEQ ID NO: 9113 - RNA, 22 nt, synthetic construct
  source 1..22: mol_type = other RNA
agacattttgaaccctgtggtc

SEQ ID NO: 9114 - RNA, 22 nt, synthetic construct
  source 1..22: mol_type = other RNA
agaccacagggttcaaaatgtc

SEQ ID NO: 9115 - RNA, 22 nt, synthetic construct
  source 1..22: mol_type = other RNA
agaccctcactgaatacaacat

SEQ ID NO: 9116 - RNA, 22 nt, synthetic construct
  source 1..22: mol_type = other RNA
agaccttgtggctcaggggcag

SEQ ID NO: 9117 - RNA, 22 nt, synthetic construct
  source 1..22: mol_type = other RNA
agacgtttttcggcttatataa

SEQ ID NO: 9118 - RNA, 22 nt, synthetic construct
  source 1..22: mol_type = other RNA
agactagaggcttgcataataa

SEQ ID NO: 9119 - RNA, 22 nt, synthetic construct
  source 1..22: mol_type = other RNA
agagaagcactttgggattctt

SEQ ID NO: 9120 - RNA, 22 nt, synthetic construct
  source 1..22: mol_type = other RNA
agagaatgtagatattgtgaag

SEQ ID NO: 9121 - RNA, 22 nt, synthetic construct
  source 1..22: mol_type = other RNA
agagagaatgtagatattgtga

SEQ ID NO: 9122 - RNA, 22 nt, synthetic construct
  source 1..22: mol_type = other RNA
agagagagctcagatacgttga

SEQ ID NO: 9123 - RNA, 22 nt, synthetic construct
  source 1..22: mol_type = other RNA
agagagatgttttggggactca

SEQ ID NO: 9124 - RNA, 22 nt, synthetic construct
  source 1..22: mol_type = other RNA
agagagctcagatacgttgaca

SEQ ID NO: 9125 - RNA, 22 nt, synthetic construct
  source 1..22: mol_type = other RNA
agagatgttttggggactcatt

SEQ ID NO: 9126 - RNA, 22 nt, synthetic construct
  source 1..22: mol_type = other RNA
agagctcagatacgttgacata

SEQ ID NO: 9127 - RNA, 22 nt, synthetic construct
  source 1..22: mol_type = other RNA
agagcttatataagccgaaaaa

SEQ ID NO: 9128 - RNA, 22 nt, synthetic construct
  source 1..22: mol_type = other RNA
agaggcatggaccttgagttgg

SEQ ID NO: 9129 - RNA, 22 nt, synthetic construct
  source 1..22: mol_type = other RNA
agaggccaatgccccactggca

SEQ ID NO: 9130 - RNA, 22 nt, synthetic construct
  source 1..22: mol_type = other RNA
agaggctgaaagaggccaatgc

SEQ ID NO: 9131 - RNA, 22 nt, synthetic construct
  source 1..22: mol_type = other RNA
agaggcttgcataataagctaa

SEQ ID NO: 9132 - RNA, 22 nt, synthetic construct
  source 1..22: mol_type = other RNA
agagggagaagcatgaaaaagc

SEQ ID NO: 9133 - RNA, 22 nt, synthetic construct
  source 1..22: mol_type = other RNA
agaggtgagttaaaaggtgtcc

SEQ ID NO: 9134 - RNA, 22 nt, synthetic construct
  source 1..22: mol_type = other RNA
agagtatttaggcagattgaaa

SEQ ID NO: 9135 - RNA, 22 nt, synthetic construct
  source 1..22: mol_type = other RNA
agagttcctcatgtagaccttg

SEQ ID NO: 9136 - RNA, 22 nt, synthetic construct
  source 1..22: mol_type = other RNA
agagttctatgttcttccgtca

SEQ ID NO: 9137 - RNA, 22 nt, synthetic construct
  source 1..22: mol_type = other RNA
agagttgattgtcaggaagcat

SEQ ID NO: 9138 - RNA, 22 nt, synthetic construct
  source 1..22: mol_type = other RNA
agataagcaagagagatgtttt

SEQ ID NO: 9139 - RNA, 22 nt, synthetic construct
  source 1..22: mol_type = other RNA
agatacatggttgtgacctgag

SEQ ID NO: 9140 - RNA, 22 nt, synthetic construct
  source 1..22: mol_type = other RNA
agatacgttgacatataaatga

SEQ ID NO: 9141 - RNA, 22 nt, synthetic construct
  source 1..22: mol_type = other RNA
agatcctggggatacttagagt

SEQ ID NO: 9142 - RNA, 22 nt, synthetic construct
  source 1..22: mol_type = other RNA
agatgagtgtagaacacctggt

SEQ ID NO: 9143 - RNA, 22 nt, synthetic construct
  source 1..22: mol_type = other RNA
agatgatgagctactgcactac

SEQ ID NO: 9144 - RNA, 22 nt, synthetic construct
  source 1..22: mol_type = other RNA
agatgctgccagtggggcattg

SEQ ID NO: 9145 - RNA, 22 nt, synthetic construct
  source 1..22: mol_type = other RNA
agatgtgcatttttgtgaaatg

SEQ ID NO: 9146 - RNA, 22 nt, synthetic construct
  source 1..22: mol_type = other RNA
agatgtgggcccgcagcagcta

SEQ ID NO: 9147 - RNA, 22 nt, synthetic construct
  source 1..22: mol_type = other RNA
agatgttttggggactcatttc

SEQ ID NO: 9148 - RNA, 22 nt, synthetic construct
  source 1..22: mol_type = other RNA
agattcctcaaaattgaccaga

SEQ ID NO: 9149 - RNA, 22 nt, synthetic construct
  source 1..22: mol_type = other RNA
agattgaaaaggacacctttta

SEQ ID NO: 9150 - RNA, 22 nt, synthetic construct
  source 1..22: mol_type = other RNA
agattgaacactgcccccaggt

SEQ ID NO: 9151 - RNA, 22 nt, synthetic construct
  source 1..22: mol_type = other RNA
agattgaccccggaagtatact

SEQ ID NO: 9152 - RNA, 22 nt, synthetic construct
  source 1..22: mol_type = other RNA
agattttgaatgcttcctgaca

SEQ ID NO: 9153 - RNA, 22 nt, synthetic construct
  source 1..22: mol_type = other RNA
agcaagagagatgttttgggga

SEQ ID NO: 9154 - RNA, 22 nt, synthetic construct
  source 1..22: mol_type = other RNA
agcaaggcccaccttgagaggt

SEQ ID NO: 9155 - RNA, 22 nt, synthetic construct
  source 1..22: mol_type = other RNA
agcactattagagttgattgtc

SEQ ID NO: 9156 - RNA, 22 nt, synthetic construct
  source 1..22: mol_type = other RNA
agcactggtaagattgaacact

SEQ ID NO: 9157 - RNA, 22 nt, synthetic construct
  source 1..22: mol_type = other RNA
agcactttgggattctttccat

SEQ ID NO: 9158 - RNA, 22 nt, synthetic construct
  source 1..22: mol_type = other RNA
agcagctaccaggtgttctaca

SEQ ID NO: 9159 - RNA, 22 nt, synthetic construct
  source 1..22: mol_type = other RNA
agcagctacctgggggcagtgt

SEQ ID NO: 9160 - RNA, 22 nt, synthetic construct
  source 1..22: mol_type = other RNA
agcaggacaattccataggtgt

SEQ ID NO: 9161 - RNA, 22 nt, synthetic construct
  source 1..22: mol_type = other RNA
agcatcttcacttctaaatgca

SEQ ID NO: 9162 - RNA, 22 nt, synthetic construct
  source 1..22: mol_type = other RNA
agcatgaaaaagcagctaccag

SEQ ID NO: 9163 - RNA, 22 nt, synthetic construct
  source 1..22: mol_type = other RNA
agcatgtgtatttccagtgcaa

SEQ ID NO: 9164 - RNA, 22 nt, synthetic construct
  source 1..22: mol_type = other RNA
agcattcaaaatcttgaccaaa

SEQ ID NO: 9165 - RNA, 22 nt, synthetic construct
  source 1..22: mol_type = other RNA
agccacaaggtctacatgagga

SEQ ID NO: 9166 - RNA, 22 nt, synthetic construct
  source 1..22: mol_type = other RNA
agccagacaaatggaggaatat

SEQ ID NO: 9167 - RNA, 22 nt, synthetic construct
  source 1..22: mol_type = other RNA
agccatcggtgaaactaacaga

SEQ ID NO: 9168 - RNA, 22 nt, synthetic construct
  source 1..22: mol_type = other RNA
agcccagagttctatgttcttc

SEQ ID NO: 9169 - RNA, 22 nt, synthetic construct
  source 1..22: mol_type = other RNA
agcccagtttcattgatcacaa

SEQ ID NO: 9170 - RNA, 22 nt, synthetic construct
  source 1..22: mol_type = other RNA
agccgaaaaacgtctgagattc

SEQ ID NO: 9171 - RNA, 22 nt, synthetic construct
  source 1..22: mol_type = other RNA
agcctctagtcttccttttcca

SEQ ID NO: 9172 - RNA, 22 nt, synthetic construct
  source 1..22: mol_type = other RNA
agcctctttagcttattatgca

SEQ ID NO: 9173 - RNA, 22 nt, synthetic construct
  source 1..22: mol_type = other RNA
agctaaagaggctgaaagaggc

SEQ ID NO: 9174 - RNA, 22 nt, synthetic construct
  source 1..22: mol_type = other RNA
agctacagacattttgaaccct

SEQ ID NO: 9175 - RNA, 22 nt, synthetic construct
  source 1..22: mol_type = other RNA
agctaccaggtgttctacactc

SEQ ID NO: 9176 - RNA, 22 nt, synthetic construct
  source 1..22: mol_type = other RNA
agctacctgggggcagtgttca

SEQ ID NO: 9177 - RNA, 22 nt, synthetic construct
  source 1..22: mol_type = other RNA
agctactaatgatgttttccta

SEQ ID NO: 9178 - RNA, 22 nt, synthetic construct
  source 1..22: mol_type = other RNA
agctactgcactactgggcaga

SEQ ID NO: 9179 - RNA, 22 nt, synthetic construct
  source 1..22: mol_type = other RNA
agctcagatacgttgacatata

SEQ ID NO: 9180 - RNA, 22 nt, synthetic construct
  source 1..22: mol_type = other RNA
agctcatcatcttcccctccat

SEQ ID NO: 9181 - RNA, 22 nt, synthetic construct
  source 1..22: mol_type = other RNA
agctcctcaactcacctaatgt

SEQ ID NO: 9182 - RNA, 22 nt, synthetic construct
  source 1..22: mol_type = other RNA
agctccttttggatttatttca

SEQ ID NO: 9183 - RNA, 22 nt, synthetic construct
  source 1..22: mol_type = other RNA
agctctaagagaagcactttgg

SEQ ID NO: 9184 - RNA, 22 nt, synthetic construct
  source 1..22: mol_type = other RNA
agctctctctggtcaattttga

SEQ ID NO: 9185 - RNA, 22 nt, synthetic construct
  source 1..22: mol_type = other RNA
agctgacaatcaatgattttta

SEQ ID NO: 9186 - RNA, 22 nt, synthetic construct
  source 1..22: mol_type = other RNA
agctgctgcgggcccacatctg

SEQ ID NO: 9187 - RNA, 22 nt, synthetic construct
  source 1..22: mol_type = other RNA
agctgctttttcatgcttctcc

SEQ ID NO: 9188 - RNA, 22 nt, synthetic construct
  source 1..22: mol_type = other RNA
agcttatataagccgaaaaacg

SEQ ID NO: 9189 - RNA, 22 nt, synthetic construct
  source 1..22: mol_type = other RNA
agcttattatgcaagcctctag

SEQ ID NO: 9190 - RNA, 22 nt, synthetic construct
  source 1..22: mol_type = other RNA
aggaaaacatcattagtagctg

SEQ ID NO: 9191 - RNA, 22 nt, synthetic construct
  source 1..22: mol_type = other RNA
aggaaaatatgggttgcatttg

SEQ ID NO: 9192 - RNA, 22 nt, synthetic construct
  source 1..22: mol_type = other RNA
aggaactctaagtatccccagg

SEQ ID NO: 9193 - RNA, 22 nt, synthetic construct
  source 1..22: mol_type = other RNA
aggaagactagaggcttgcata

SEQ ID NO: 9194 - RNA, 22 nt, synthetic construct
  source 1..22: mol_type = other RNA
aggaagcattcaaaatcttgac

SEQ ID NO: 9195 - RNA, 22 nt, synthetic construct
  source 1..22: mol_type = other RNA
aggaatatgacggaagaacata

SEQ ID NO: 9196 - RNA, 22 nt, synthetic construct
  source 1..22: mol_type = other RNA
aggaatctcagacgtttttcgg

SEQ ID NO: 9197 - RNA, 22 nt, synthetic construct
  source 1..22: mol_type = other RNA
aggaatgaaatgagtccccaaa

SEQ ID NO: 9198 - RNA, 22 nt, synthetic construct
  source 1..22: mol_type = other RNA
aggacaattccataggtgtctt

SEQ ID NO: 9199 - RNA, 22 nt, synthetic construct
  source 1..22: mol_type = other RNA
aggacaccttttaactcacctc

SEQ ID NO: 9200 - RNA, 22 nt, synthetic construct
  source 1..22: mol_type = other RNA
aggagctacagacattttgaac

SEQ ID NO: 9201 - RNA, 22 nt, synthetic construct
  source 1..22: mol_type = other RNA
aggagctttcaacaaggaatag

SEQ ID NO: 9202 - RNA, 22 nt, synthetic construct
  source 1..22: mol_type = other RNA
aggatatgcatttagaagtgaa

SEQ ID NO: 9203 - RNA, 22 nt, synthetic construct
  source 1..22: mol_type = other RNA
aggatctggtgatgatggaggg

SEQ ID NO: 9204 - RNA, 22 nt, synthetic construct
  source 1..22: mol_type = other RNA
aggatttaagggatggaaaagg

SEQ ID NO: 9205 - RNA, 22 nt, synthetic construct
  source 1..22: mol_type = other RNA
aggcaagtccaactcaaggtcc

SEQ ID NO: 9206 - RNA, 22 nt, synthetic construct
  source 1..22: mol_type = other RNA
aggcaccgagaatgttgtattc

SEQ ID NO: 9207 - RNA, 22 nt, synthetic construct
  source 1..22: mol_type = other RNA
aggcactaagatgagtgtagaa

SEQ ID NO: 9208 - RNA, 22 nt, synthetic construct
  source 1..22: mol_type = other RNA
aggcagattgaaaaggacacct

SEQ ID NO: 9209 - RNA, 22 nt, synthetic construct
  source 1..22: mol_type = other RNA
aggcatggaccttgagttggac

SEQ ID NO: 9210 - RNA, 22 nt, synthetic construct
  source 1..22: mol_type = other RNA
aggccaatgccccactggcagc

SEQ ID NO: 9211 - RNA, 22 nt, synthetic construct
  source 1..22: mol_type = other RNA
aggccacccttcttatacttca

SEQ ID NO: 9212 - RNA, 22 nt, synthetic construct
  source 1..22: mol_type = other RNA
aggcccaccttgagaggtgagt

SEQ ID NO: 9213 - RNA, 22 nt, synthetic construct
  source 1..22: mol_type = other RNA
aggctgaaagaggccaatgccc

SEQ ID NO: 9214 - RNA, 22 nt, synthetic construct
  source 1..22: mol_type = other RNA
aggcttgcataataagctaaag

SEQ ID NO: 9215 - RNA, 22 nt, synthetic construct
  source 1..22: mol_type = other RNA
agggagaagcatgaaaaagcag

SEQ ID NO: 9216 - RNA, 22 nt, synthetic construct
  source 1..22: mol_type = other RNA
agggatggaaaaggaagactag

SEQ ID NO: 9217 - RNA, 22 nt, synthetic construct
  source 1..22: mol_type = other RNA
aggggaagatgatgagctactg

SEQ ID NO: 9218 - RNA, 22 nt, synthetic construct
  source 1..22: mol_type = other RNA
aggggcaggttgttgcaagatt

SEQ ID NO: 9219 - RNA, 22 nt, synthetic construct
  source 1..22: mol_type = other RNA
agggggactgtctttcagatac

SEQ ID NO: 9220 - RNA, 22 nt, synthetic construct
  source 1..22: mol_type = other RNA
agggtcttcttacatgcatttg

SEQ ID NO: 9221 - RNA, 22 nt, synthetic construct
  source 1..22: mol_type = other RNA
agggtggccttgtgatcaatga

SEQ ID NO: 9222 - RNA, 22 nt, synthetic construct
  source 1..22: mol_type = other RNA
agggttcaaaatgtctgtagct

SEQ ID NO: 9223 - RNA, 22 nt, synthetic construct
  source 1..22: mol_type = other RNA
aggtagcaaggcccaccttgag

SEQ ID NO: 9224 - RNA, 22 nt, synthetic construct
  source 1..22: mol_type = other RNA
aggtagctgctgcgggcccaca

SEQ ID NO: 9225 - RNA, 22 nt, synthetic construct
  source 1..22: mol_type = other RNA
aggtcaagtaagaagacatgaa

SEQ ID NO: 9226 - RNA, 22 nt, synthetic construct
  source 1..22: mol_type = other RNA
aggtcacaaccatgtatctgaa

SEQ ID NO: 9227 - RNA, 22 nt, synthetic construct
  source 1..22: mol_type = other RNA
aggtccacttggttcatgtctt

SEQ ID NO: 9228 - RNA, 22 nt, synthetic construct
  source 1..22: mol_type = other RNA
aggtccatgcctctggaatggg

SEQ ID NO: 9229 - RNA, 22 nt, synthetic construct
  source 1..22: mol_type = other RNA
aggtctacatgaggaactctaa

SEQ ID NO: 9230 - RNA, 22 nt, synthetic construct
  source 1..22: mol_type = other RNA
aggtgagttaaaaggtgtcctt

SEQ ID NO: 9231 - RNA, 22 nt, synthetic construct
  source 1..22: mol_type = other RNA
aggtgagttgaggagctacaga

SEQ ID NO: 9232 - RNA, 22 nt, synthetic construct
  source 1..22: mol_type = other RNA
aggtgggccttgctacctcaag

SEQ ID NO: 9233 - RNA, 22 nt, synthetic construct
  source 1..22: mol_type = other RNA
aggtgtccttttcaatctgcct

SEQ ID NO: 9234 - RNA, 22 nt, synthetic construct
  source 1..22: mol_type = other RNA
aggtgtcttcccattccagagg

SEQ ID NO: 9235 - RNA, 22 nt, synthetic construct
  source 1..22: mol_type = other RNA
aggtgttctacactcatcttag

SEQ ID NO: 9236 - RNA, 22 nt, synthetic construct
  source 1..22: mol_type = other RNA
aggttgttgcaagattgacccc

SEQ ID NO: 9237 - RNA, 22 nt, synthetic construct
  source 1..22: mol_type = other RNA
agtaagaagacatgaaccaagt

SEQ ID NO: 9238 - RNA, 22 nt, synthetic construct
  source 1..22: mol_type = other RNA
agtacagcccagtttcattgat

SEQ ID NO: 9239 - RNA, 22 nt, synthetic construct
  source 1..22: mol_type = other RNA
agtacatattaggaaaatatgg

SEQ ID NO: 9240 - RNA, 22 nt, synthetic construct
  source 1..22: mol_type = other RNA
agtagctcatcatcttcccctc

SEQ ID NO: 9241 - RNA, 22 nt, synthetic construct
  source 1..22: mol_type = other RNA
agtagctgacaatcaatgattt

SEQ ID NO: 9242 - RNA, 22 nt, synthetic construct
  source 1..22: mol_type = other RNA
agtagtgcagtagctcatcatc

SEQ ID NO: 9243 - RNA, 22 nt, synthetic construct
  source 1..22: mol_type = other RNA
agtataagaagggtggccttgt

SEQ ID NO: 9244 - RNA, 22 nt, synthetic construct
  source 1..22: mol_type = other RNA
agtatacttccggggtcaatct

SEQ ID NO: 9245 - RNA, 22 nt, synthetic construct
  source 1..22: mol_type = other RNA
agtatccccaggatctggtgat

SEQ ID NO: 9246 - RNA, 22 nt, synthetic construct
  source 1..22: mol_type = other RNA
agtatttaggcagattgaaaag

SEQ ID NO: 9247 - RNA, 22 nt, synthetic construct
  source 1..22: mol_type = other RNA
agtccaactcaaggtccatgcc

SEQ ID NO: 9248 - RNA, 22 nt, synthetic construct
  source 1..22: mol_type = other RNA
agtccccaaaacatctctcttg

SEQ ID NO: 9249 - RNA, 22 nt, synthetic construct
  source 1..22: mol_type = other RNA
agtcccccttgaggtagcaagg

SEQ ID NO: 9250 - RNA, 22 nt, synthetic construct
  source 1..22: mol_type = other RNA
agtcttccttttccatccctta

SEQ ID NO: 9251 - RNA, 22 nt, synthetic construct
  source 1..22: mol_type = other RNA
agtgaagatgctgccagtgggg

SEQ ID NO: 9252 - RNA, 22 nt, synthetic construct
  source 1..22: mol_type = other RNA
agtgaagtataagaagggtggc

SEQ ID NO: 9253 - RNA, 22 nt, synthetic construct
  source 1..22: mol_type = other RNA
agtgagggtcttcttacatgca

SEQ ID NO: 9254 - RNA, 22 nt, synthetic construct
  source 1..22: mol_type = other RNA
agtgcaattgtaggggtgtgtg

SEQ ID NO: 9255 - RNA, 22 nt, synthetic construct
  source 1..22: mol_type = other RNA
agtgcagtagctcatcatcttc

SEQ ID NO: 9256 - RNA, 22 nt, synthetic construct
  source 1..22: mol_type = other RNA
agtgcctgagagtatttaggca

SEQ ID NO: 9257 - RNA, 22 nt, synthetic construct
  source 1..22: mol_type = other RNA
agtgctgatcatttatatgtca

SEQ ID NO: 9258 - RNA, 22 nt, synthetic construct
  source 1..22: mol_type = other RNA
agtgcttaaaaatcattgattg

SEQ ID NO: 9259 - RNA, 22 nt, synthetic construct
  source 1..22: mol_type = other RNA
agtgcttctcttagagcttata

SEQ ID NO: 9260 - RNA, 22 nt, synthetic construct
  source 1..22: mol_type = other RNA
agtggaccttgagaccacaggg

SEQ ID NO: 9261 - RNA, 22 nt, synthetic construct
  source 1..22: mol_type = other RNA
agtggggcattggcctctttca

SEQ ID NO: 9262 - RNA, 22 nt, synthetic construct
  source 1..22: mol_type = other RNA
agtgtagaacacctggtagctg

SEQ ID NO: 9263 - RNA, 22 nt, synthetic construct
  source 1..22: mol_type = other RNA
agtgttcaatcttaccagtgct

SEQ ID NO: 9264 - RNA, 22 nt, synthetic construct
  source 1..22: mol_type = other RNA
agttaaaaggtgtccttttcaa

SEQ ID NO: 9265 - RNA, 22 nt, synthetic construct
  source 1..22: mol_type = other RNA
agttcctcatgtagaccttgtg

SEQ ID NO: 9266 - RNA, 22 nt, synthetic construct
  source 1..22: mol_type = other RNA
agttctatgttcttccgtcata

SEQ ID NO: 9267 - RNA, 22 nt, synthetic construct
  source 1..22: mol_type = other RNA
agttgaggagctacagacattt

SEQ ID NO: 9268 - RNA, 22 nt, synthetic construct
  source 1..22: mol_type = other RNA
agttgattgtcaggaagcattc

SEQ ID NO: 9269 - RNA, 22 nt, synthetic construct
  source 1..22: mol_type = other RNA
agttggacttgcctgaaataaa

SEQ ID NO: 9270 - RNA, 22 nt, synthetic construct
  source 1..22: mol_type = other RNA
agtttcaccgatggctcaggat

SEQ ID NO: 9271 - RNA, 22 nt, synthetic construct
  source 1..22: mol_type = other RNA
agtttcattgatcacaaggcca

SEQ ID NO: 9272 - RNA, 22 nt, synthetic construct
  source 1..22: mol_type = other RNA
ataaacattaggtgagttgagg

SEQ ID NO: 9273 - RNA, 22 nt, synthetic construct
  source 1..22: mol_type = other RNA
ataaatccaaaaggagctttca

SEQ ID NO: 9274 - RNA, 22 nt, synthetic construct
  source 1..22: mol_type = other RNA
ataaatgatcagcactggtaag

SEQ ID NO: 9275 - RNA, 22 nt, synthetic construct
  source 1..22: mol_type = other RNA
ataagaagggtggccttgtgat

SEQ ID NO: 9276 - RNA, 22 nt, synthetic construct
  source 1..22: mol_type = other RNA
ataagcaagagagatgttttgg

SEQ ID NO: 9277 - RNA, 22 nt, synthetic construct
  source 1..22: mol_type = other RNA
ataagccgaaaaacgtctgaga

SEQ ID NO: 9278 - RNA, 22 nt, synthetic construct
  source 1..22: mol_type = other RNA
ataagctaaagaggctgaaaga

SEQ ID NO: 9279 - RNA, 22 nt, synthetic construct
  source 1..22: mol_type = other RNA
ataagctctaagagaagcactt

SEQ ID NO: 9280 - RNA, 22 nt, synthetic construct
  source 1..22: mol_type = other RNA
ataataagctaaagaggctgaa

SEQ ID NO: 9281 - RNA, 22 nt, synthetic construct
  source 1..22: mol_type = other RNA
ataatggaaagaatcccaaagt

SEQ ID NO: 9282 - RNA, 22 nt, synthetic construct
  source 1..22: mol_type = other RNA
atacaaagtacagcccagtttc

SEQ ID NO: 9283 - RNA, 22 nt, synthetic construct
  source 1..22: mol_type = other RNA
atacaacattctcggtgcctgt

SEQ ID NO: 9284 - RNA, 22 nt, synthetic construct
  source 1..22: mol_type = other RNA
atacacatgctgtgttaggaat

SEQ ID NO: 9285 - RNA, 22 nt, synthetic construct
  source 1..22: mol_type = other RNA
atacatggttgtgacctgagga

SEQ ID NO: 9286 - RNA, 22 nt, synthetic construct
  source 1..22: mol_type = other RNA
atacgttgacatataaatgatc

SEQ ID NO: 9287 - RNA, 22 nt, synthetic construct
  source 1..22: mol_type = other RNA
atactctcaggcactaagatga

SEQ ID NO: 9288 - RNA, 22 nt, synthetic construct
  source 1..22: mol_type = other RNA
atacttagagttcctcatgtag

SEQ ID NO: 9289 - RNA, 22 nt, synthetic construct
  source 1..22: mol_type = other RNA
atacttcactccagaaagcagg

SEQ ID NO: 9290 - RNA, 22 nt, synthetic construct
  source 1..22: mol_type = other RNA
atacttccggggtcaatcttgc

SEQ ID NO: 9291 - RNA, 22 nt, synthetic construct
  source 1..22: mol_type = other RNA
atagaactctgggctgccatgt

SEQ ID NO: 9292 - RNA, 22 nt, synthetic construct
  source 1..22: mol_type = other RNA
ataggaaaacatcattagtagc

SEQ ID NO: 9293 - RNA, 22 nt, synthetic construct
  source 1..22: mol_type = other RNA
ataggtgtcttcccattccaga

SEQ ID NO: 9294 - RNA, 22 nt, synthetic construct
  source 1..22: mol_type = other RNA
atataaatgatcagcactggta

SEQ ID NO: 9295 - RNA, 22 nt, synthetic construct
  source 1..22: mol_type = other RNA
atataagccgaaaaacgtctga

SEQ ID NO: 9296 - RNA, 22 nt, synthetic construct
  source 1..22: mol_type = other RNA
atataagctctaagagaagcac

SEQ ID NO: 9297 - RNA, 22 nt, synthetic construct
  source 1..22: mol_type = other RNA
atatacaaagtacagcccagtt

SEQ ID NO: 9298 - RNA, 22 nt, synthetic construct
  source 1..22: mol_type = other RNA
atatcctgagccatcggtgaaa

SEQ ID NO: 9299 - RNA, 22 nt, synthetic construct
  source 1..22: mol_type = other RNA
atatctacattctctctttagt

SEQ ID NO: 9300 - RNA, 22 nt, synthetic construct
  source 1..22: mol_type = other RNA
atatgacggaagaacatagaac

SEQ ID NO: 9301 - RNA, 22 nt, synthetic construct
  source 1..22: mol_type = other RNA
atatgcatttagaagtgaagat

SEQ ID NO: 9302 - RNA, 22 nt, synthetic construct
  source 1..22: mol_type = other RNA
atatgggttgcatttggtcaag

SEQ ID NO: 9303 - RNA, 22 nt, synthetic construct
  source 1..22: mol_type = other RNA
atatgtacttcacaatatctac

SEQ ID NO: 9304 - RNA, 22 nt, synthetic construct
  source 1..22: mol_type = other RNA
atatgtcaacgtatctgagctc

SEQ ID NO: 9305 - RNA, 22 nt, synthetic construct
  source 1..22: mol_type = other RNA
atattaggaaaatatgggttgc

SEQ ID NO: 9306 - RNA, 22 nt, synthetic construct
  source 1..22: mol_type = other RNA
atattccaaagtatacttccgg

SEQ ID NO: 9307 - RNA, 22 nt, synthetic construct
  source 1..22: mol_type = other RNA
atattcctccatttgtctggct

SEQ ID NO: 9308 - RNA, 22 nt, synthetic construct
  source 1..22: mol_type = other RNA
atattgtgaagtacatattagg

SEQ ID NO: 9309 - RNA, 22 nt, synthetic construct
  source 1..22: mol_type = other RNA
atcaactctaatagtgcttaaa

SEQ ID NO: 9310 - RNA, 22 nt, synthetic construct
  source 1..22: mol_type = other RNA
atcaatgaaactgggctgtact

SEQ ID NO: 9311 - RNA, 22 nt, synthetic construct
  source 1..22: mol_type = other RNA
atcacaaggccacccttcttat

SEQ ID NO: 9312 - RNA, 22 nt, synthetic construct
  source 1..22: mol_type = other RNA
atcaccagatcctggggatact

SEQ ID NO: 9313 - RNA, 22 nt, synthetic construct
  source 1..22: mol_type = other RNA
atcagcactggtaagattgaac

SEQ ID NO: 9314 - RNA, 22 nt, synthetic construct
  source 1..22: mol_type = other RNA
atcataatggaaagaatcccaa

SEQ ID NO: 9315 - RNA, 22 nt, synthetic construct
  source 1..22: mol_type = other RNA
atcatcaccagatcctggggat

SEQ ID NO: 9316 - RNA, 22 nt, synthetic construct
  source 1..22: mol_type = other RNA
atcatcttcccctccatcatca

SEQ ID NO: 9317 - RNA, 22 nt, synthetic construct
  source 1..22: mol_type = other RNA
atcattagtagctgacaatcaa

SEQ ID NO: 9318 - RNA, 22 nt, synthetic construct
  source 1..22: mol_type = other RNA
atcattgattgtcagctactaa

SEQ ID NO: 9319 - RNA, 22 nt, synthetic construct
  source 1..22: mol_type = other RNA
atcatttatatgtcaacgtatc

SEQ ID NO: 9320 - RNA, 22 nt, synthetic construct
  source 1..22: mol_type = other RNA
atccaaaaggagctttcaacaa

SEQ ID NO: 9321 - RNA, 22 nt, synthetic construct
  source 1..22: mol_type = other RNA
atcccaaagtgcttctcttaga

SEQ ID NO: 9322 - RNA, 22 nt, synthetic construct
  source 1..22: mol_type = other RNA
atccccaggatctggtgatgat

SEQ ID NO: 9323 - RNA, 22 nt, synthetic construct
  source 1..22: mol_type = other RNA
atcccttaaatcctcaggtcac

SEQ ID NO: 9324 - RNA, 22 nt, synthetic construct
  source 1..22: mol_type = other RNA
atcctcaggtcacaaccatgta

SEQ ID NO: 9325 - RNA, 22 nt, synthetic construct
  source 1..22: mol_type = other RNA
atcctgagccatcggtgaaact

SEQ ID NO: 9326 - RNA, 22 nt, synthetic construct
  source 1..22: mol_type = other RNA
atcctggggatacttagagttc

SEQ ID NO: 9327 - RNA, 22 nt, synthetic construct
  source 1..22: mol_type = other RNA
atcggtgaaactaacagataag

SEQ ID NO: 9328 - RNA, 22 nt, synthetic construct
  source 1..22: mol_type = other RNA
atctacattctctctttagtca

SEQ ID NO: 9329 - RNA, 22 nt, synthetic construct
  source 1..22: mol_type = other RNA
atctcagacgtttttcggctta

SEQ ID NO: 9330 - RNA, 22 nt, synthetic construct
  source 1..22: mol_type = other RNA
atctctcttgcttatctgttag

SEQ ID NO: 9331 - RNA, 22 nt, synthetic construct
  source 1..22: mol_type = other RNA
atctgaaagacagtcccccttg

SEQ ID NO: 9332 - RNA, 22 nt, synthetic construct
  source 1..22: mol_type = other RNA
atctgagctctctctggtcaat

SEQ ID NO: 9333 - RNA, 22 nt, synthetic construct
  source 1..22: mol_type = other RNA
atctgcccagtagtgcagtagc

SEQ ID NO: 9334 - RNA, 22 nt, synthetic construct
  source 1..22: mol_type = other RNA
atctgcctaaatactctcaggc

SEQ ID NO: 9335 - RNA, 22 nt, synthetic construct
  source 1..22: mol_type = other RNA
atctggtgatgatggaggggaa

SEQ ID NO: 9336 - RNA, 22 nt, synthetic construct
  source 1..22: mol_type = other RNA
atctgttagtttcaccgatggc

SEQ ID NO: 9337 - RNA, 22 nt, synthetic construct
  source 1..22: mol_type = other RNA
atcttaccagtgctgatcattt

SEQ ID NO: 9338 - RNA, 22 nt, synthetic construct
  source 1..22: mol_type = other RNA
atcttagtgcctgagagtattt

SEQ ID NO: 9339 - RNA, 22 nt, synthetic construct
  source 1..22: mol_type = other RNA
atcttcacttctaaatgcatat

SEQ ID NO: 9340 - RNA, 22 nt, synthetic construct
  source 1..22: mol_type = other RNA
atcttcccctccatcatcacca

SEQ ID NO: 9341 - RNA, 22 nt, synthetic construct
  source 1..22: mol_type = other RNA
atcttgaccaaatgcaacccat

SEQ ID NO: 9342 - RNA, 22 nt, synthetic construct
  source 1..22: mol_type = other RNA
atcttgcaacaacctgcccctg

SEQ ID NO: 9343 - RNA, 22 nt, synthetic construct
  source 1..22: mol_type = other RNA
atgaaaaagcagctaccaggtg

SEQ ID NO: 9344 - RNA, 22 nt, synthetic construct
  source 1..22: mol_type = other RNA
atgaaactgggctgtactttgt

SEQ ID NO: 9345 - RNA, 22 nt, synthetic construct
  source 1..22: mol_type = other RNA
atgaaatgagtccccaaaacat

SEQ ID NO: 9346 - RNA, 22 nt, synthetic construct
  source 1..22: mol_type = other RNA
atgaaccaagtggaccttgaga

SEQ ID NO: 9347 - RNA, 22 nt, synthetic construct
  source 1..22: mol_type = other RNA
atgacggaagaacatagaactc

SEQ ID NO: 9348 - RNA, 22 nt, synthetic construct
  source 1..22: mol_type = other RNA
atgactaaagagagaatgtaga

SEQ ID NO: 9349 - RNA, 22 nt, synthetic construct
  source 1..22: mol_type = other RNA
atgactattccttgttgaaagc

SEQ ID NO: 9350 - RNA, 22 nt, synthetic construct
  source 1..22: mol_type = other RNA
atgagccagacaaatggaggaa

SEQ ID NO: 9351 - RNA, 22 nt, synthetic construct
  source 1..22: mol_type = other RNA
atgagctactgcactactgggc

SEQ ID NO: 9352 - RNA, 22 nt, synthetic construct
  source 1..22: mol_type = other RNA
atgaggaactctaagtatcccc

SEQ ID NO: 9353 - RNA, 22 nt, synthetic construct
  source 1..22: mol_type = other RNA
atgagtccccaaaacatctctc

SEQ ID NO: 9354 - RNA, 22 nt, synthetic construct
  source 1..22: mol_type = other RNA
atgagtgtagaacacctggtag

SEQ ID NO: 9355 - RNA, 22 nt, synthetic construct
  source 1..22: mol_type = other RNA
atgatcagcactggtaagattg

SEQ ID NO: 9356 - RNA, 22 nt, synthetic construct
  source 1..22: mol_type = other RNA
atgatgagctactgcactactg

SEQ ID NO: 9357 - RNA, 22 nt, synthetic construct
  source 1..22: mol_type = other RNA
atgatggaggggaagatgatga

SEQ ID NO: 9358 - RNA, 22 nt, synthetic construct
  source 1..22: mol_type = other RNA
atgattctttgttacaggcacc

SEQ ID NO: 9359 - RNA, 22 nt, synthetic construct
  source 1..22: mol_type = other RNA
atgcaacccatattttcctaat

SEQ ID NO: 9360 - RNA, 22 nt, synthetic construct
  source 1..22: mol_type = other RNA
atgcaagcctctagtcttcctt

SEQ ID NO: 9361 - RNA, 22 nt, synthetic construct
  source 1..22: mol_type = other RNA
atgcatatcctgagccatcggt

SEQ ID NO: 9362 - RNA, 22 nt, synthetic construct
  source 1..22: mol_type = other RNA
atgcatgactattccttgttga

SEQ ID NO: 9363 - RNA, 22 nt, synthetic construct
  source 1..22: mol_type = other RNA
atgcatgtaagaagaccctcac

SEQ ID NO: 9364 - RNA, 22 nt, synthetic construct
  source 1..22: mol_type = other RNA
atgcatttagaagtgaagatgc

SEQ ID NO: 9365 - RNA, 22 nt, synthetic construct
  source 1..22: mol_type = other RNA
atgcatttgaggtcaagtaaga

SEQ ID NO: 9366 - RNA, 22 nt, synthetic construct
  source 1..22: mol_type = other RNA
atgccccactggcagcatcttc

SEQ ID NO: 9367 - RNA, 22 nt, synthetic construct
  source 1..22: mol_type = other RNA
atgcctctggaatgggaagaca

SEQ ID NO: 9368 - RNA, 22 nt, synthetic construct
  source 1..22: mol_type = other RNA
atgctgccagtggggcattggc

SEQ ID NO: 9369 - RNA, 22 nt, synthetic construct
  source 1..22: mol_type = other RNA
atgctgtgttaggaatgaaatg

SEQ ID NO: 9370 - RNA, 22 nt, synthetic construct
  source 1..22: mol_type = other RNA
atgcttcctgacaatcaactct

SEQ ID NO: 9371 - RNA, 22 nt, synthetic construct
  source 1..22: mol_type = other RNA
atgcttctccctcttcacatgg

SEQ ID NO: 9372 - RNA, 22 nt, synthetic construct
  source 1..22: mol_type = other RNA
atggaaaaggaagactagaggc

SEQ ID NO: 9373 - RNA, 22 nt, synthetic construct
  source 1..22: mol_type = other RNA
atggaaagaatcccaaagtgct

SEQ ID NO: 9374 - RNA, 22 nt, synthetic construct
  source 1..22: mol_type = other RNA
atggaattgtcctgctttctgg

SEQ ID NO: 9375 - RNA, 22 nt, synthetic construct
  source 1..22: mol_type = other RNA
atggaccttgagttggacttgc

SEQ ID NO: 9376 - RNA, 22 nt, synthetic construct
  source 1..22: mol_type = other RNA
atggaggaatatgacggaagaa

SEQ ID NO: 9377 - RNA, 22 nt, synthetic construct
  source 1..22: mol_type = other RNA
atggaggggaagatgatgagct

SEQ ID NO: 9378 - RNA, 22 nt, synthetic construct
  source 1..22: mol_type = other RNA
atggcagcccagagttctatgt

SEQ ID NO: 9379 - RNA, 22 nt, synthetic construct
  source 1..22: mol_type = other RNA
atggctcaggatatgcatttag

SEQ ID NO: 9380 - RNA, 22 nt, synthetic construct
  source 1..22: mol_type = other RNA
atgggaagacacctatggaatt

SEQ ID NO: 9381 - RNA, 22 nt, synthetic construct
  source 1..22: mol_type = other RNA
atgggttgcatttggtcaagat

SEQ ID NO: 9382 - RNA, 22 nt, synthetic construct
  source 1..22: mol_type = other RNA
atggttgtgacctgaggattta

SEQ ID NO: 9383 - RNA, 22 nt, synthetic construct
  source 1..22: mol_type = other RNA
atgtaagaagaccctcactgaa

SEQ ID NO: 9384 - RNA, 22 nt, synthetic construct
  source 1..22: mol_type = other RNA
atgtacttcacaatatctacat

SEQ ID NO: 9385 - RNA, 22 nt, synthetic construct
  source 1..22: mol_type = other RNA
atgtagaccttgtggctcaggg

SEQ ID NO: 9386 - RNA, 22 nt, synthetic construct
  source 1..22: mol_type = other RNA
atgtagatattgtgaagtacat

SEQ ID NO: 9387 - RNA, 22 nt, synthetic construct
  source 1..22: mol_type = other RNA
atgtagatgtgcatttttgtga

SEQ ID NO: 9388 - RNA, 22 nt, synthetic construct
  source 1..22: mol_type = other RNA
atgtatctgaaagacagtcccc

SEQ ID NO: 9389 - RNA, 22 nt, synthetic construct
  source 1..22: mol_type = other RNA
atgtcaacgtatctgagctctc

SEQ ID NO: 9390 - RNA, 22 nt, synthetic construct
  source 1..22: mol_type = other RNA
atgtctgtagctcctcaactca

SEQ ID NO: 9391 - RNA, 22 nt, synthetic construct
  source 1..22: mol_type = other RNA
atgtcttcttacttgacctcaa

SEQ ID NO: 9392 - RNA, 22 nt, synthetic construct
  source 1..22: mol_type = other RNA
atgtgaagagggagaagcatga

SEQ ID NO: 9393 - RNA, 22 nt, synthetic construct
  source 1..22: mol_type = other RNA
atgtgcatttttgtgaaatgaa

SEQ ID NO: 9394 - RNA, 22 nt, synthetic construct
  source 1..22: mol_type = other RNA
atgtgggcccgcagcagctacc

SEQ ID NO: 9395 - RNA, 22 nt, synthetic construct
  source 1..22: mol_type = other RNA
atgtgtatttccagtgcaattg

SEQ ID NO: 9396 - RNA, 22 nt, synthetic construct
  source 1..22: mol_type = other RNA
atgttcttccgtcatattcctc

SEQ ID NO: 9397 - RNA, 22 nt, synthetic construct
  source 1..22: mol_type = other RNA
atgttgtattcagtgagggtct

SEQ ID NO: 9398 - RNA, 22 nt, synthetic construct
  source 1..22: mol_type = other RNA
atgtttatgagccagacaaatg

SEQ ID NO: 9399 - RNA, 22 nt, synthetic construct
  source 1..22: mol_type = other RNA
atgttttggggactcatttcat

SEQ ID NO: 9400 - RNA, 22 nt, synthetic construct
  source 1..22: mol_type = other RNA
attagagttgattgtcaggaag

SEQ ID NO: 9401 - RNA, 22 nt, synthetic construct
  source 1..22: mol_type = other RNA
attaggaaaatatgggttgcat

SEQ ID NO: 9402 - RNA, 22 nt, synthetic construct
  source 1..22: mol_type = other RNA
attaggtgagttgaggagctac

SEQ ID NO: 9403 - RNA, 22 nt, synthetic construct
  source 1..22: mol_type = other RNA
attagtagctgacaatcaatga

SEQ ID NO: 9404 - RNA, 22 nt, synthetic construct
  source 1..22: mol_type = other RNA
attatgattctttgttacaggc

SEQ ID NO: 9405 - RNA, 22 nt, synthetic construct
  source 1..22: mol_type = other RNA
attatgcaagcctctagtcttc

SEQ ID NO: 9406 - RNA, 22 nt, synthetic construct
  source 1..22: mol_type = other RNA
attcaaaatcttgaccaaatgc

SEQ ID NO: 9407 - RNA, 22 nt, synthetic construct
  source 1..22: mol_type = other RNA
attcagtgagggtcttcttaca

SEQ ID NO: 9408 - RNA, 22 nt, synthetic construct
  source 1..22: mol_type = other RNA
attccaaagtatacttccgggg

SEQ ID NO: 9409 - RNA, 22 nt, synthetic construct
  source 1..22: mol_type = other RNA
attccagaggcatggaccttga

SEQ ID NO: 9410 - RNA, 22 nt, synthetic construct
  source 1..22: mol_type = other RNA
attccataggtgtcttcccatt

SEQ ID NO: 9411 - RNA, 22 nt, synthetic construct
  source 1..22: mol_type = other RNA
attcctaacacagcatgtgtat

SEQ ID NO: 9412 - RNA, 22 nt, synthetic construct
  source 1..22: mol_type = other RNA
attcctcaaaattgaccagaga

SEQ ID NO: 9413 - RNA, 22 nt, synthetic construct
  source 1..22: mol_type = other RNA
attcctccatttgtctggctca

SEQ ID NO: 9414 - RNA, 22 nt, synthetic construct
  source 1..22: mol_type = other RNA
attccttgttgaaagctccttt

SEQ ID NO: 9415 - RNA, 22 nt, synthetic construct
  source 1..22: mol_type = other RNA
attctcggtgcctgtaacaaag

SEQ ID NO: 9416 - RNA, 22 nt, synthetic construct
  source 1..22: mol_type = other RNA
attctctctttagtcatacaca

SEQ ID NO: 9417 - RNA, 22 nt, synthetic construct
  source 1..22: mol_type = other RNA
attctttgttacaggcaccgag

SEQ ID NO: 9418 - RNA, 22 nt, synthetic construct
  source 1..22: mol_type = other RNA
attgaaaaggacaccttttaac

SEQ ID NO: 9419 - RNA, 22 nt, synthetic construct
  source 1..22: mol_type = other RNA
attgaacactgcccccaggtag

SEQ ID NO: 9420 - RNA, 22 nt, synthetic construct
  source 1..22: mol_type = other RNA
attgaccagagagagctcagat

SEQ ID NO: 9421 - RNA, 22 nt, synthetic construct
  source 1..22: mol_type = other RNA
attgaccccggaagtatacttt

SEQ ID NO: 9422 - RNA, 22 nt, synthetic construct
  source 1..22: mol_type = other RNA
attgatcacaaggccacccttc

SEQ ID NO: 9423 - RNA, 22 nt, synthetic construct
  source 1..22: mol_type = other RNA
attgattgtcagctactaatga

SEQ ID NO: 9424 - RNA, 22 nt, synthetic construct
  source 1..22: mol_type = other RNA
attgcactggaaatacacatgc

SEQ ID NO: 9425 - RNA, 22 nt, synthetic construct
  source 1..22: mol_type = other RNA
attggcctctttcagcctcttt

SEQ ID NO: 9426 - RNA, 22 nt, synthetic construct
  source 1..22: mol_type = other RNA
attgtcagctactaatgatgtt

SEQ ID NO: 9427 - RNA, 22 nt, synthetic construct
  source 1..22: mol_type = other RNA
attgtcaggaagcattcaaaat

SEQ ID NO: 9428 - RNA, 22 nt, synthetic construct
  source 1..22: mol_type = other RNA
attgtcctgctttctggagtga

SEQ ID NO: 9429 - RNA, 22 nt, synthetic construct
  source 1..22: mol_type = other RNA
attgtgaagtacatattaggaa

SEQ ID NO: 9430 - RNA, 22 nt, synthetic construct
  source 1..22: mol_type = other RNA
atttaagggatggaaaaggaag

SEQ ID NO: 9431 - RNA, 22 nt, synthetic construct
  source 1..22: mol_type = other RNA
atttagaagtgaagatgctgcc

SEQ ID NO: 9432 - RNA, 22 nt, synthetic construct
  source 1..22: mol_type = other RNA
atttaggcagattgaaaaggac

SEQ ID NO: 9433 - RNA, 22 nt, synthetic construct
  source 1..22: mol_type = other RNA
atttatatgtcaacgtatctga

SEQ ID NO: 9434 - RNA, 22 nt, synthetic construct
  source 1..22: mol_type = other RNA
atttatttcaggcaagtccaac

SEQ ID NO: 9435 - RNA, 22 nt, synthetic construct
  source 1..22: mol_type = other RNA
atttcacaaaaatgcacatcta

SEQ ID NO: 9436 - RNA, 22 nt, synthetic construct
  source 1..22: mol_type = other RNA
atttcaggcaagtccaactcaa

SEQ ID NO: 9437 - RNA, 22 nt, synthetic construct
  source 1..22: mol_type = other RNA
atttcattcctaacacagcatg

SEQ ID NO: 9438 - RNA, 22 nt, synthetic construct
  source 1..22: mol_type = other RNA
atttccagtgcaattgtagggg

SEQ ID NO: 9439 - RNA, 22 nt, synthetic construct
  source 1..22: mol_type = other RNA
atttgaggtcaagtaagaagac

SEQ ID NO: 9440 - RNA, 22 nt, synthetic construct
  source 1..22: mol_type = other RNA
atttggtcaagattttgaatgc

SEQ ID NO: 9441 - RNA, 22 nt, synthetic construct
  source 1..22: mol_type = other RNA
atttgtctggctcataaacatt

SEQ ID NO: 9442 - RNA, 22 nt, synthetic construct
  source 1..22: mol_type = other RNA
attttcctaatatgtacttcac

SEQ ID NO: 9443 - RNA, 22 nt, synthetic construct
  source 1..22: mol_type = other RNA
attttgaaccctgtggtctcaa

SEQ ID NO: 9444 - RNA, 22 nt, synthetic construct
  source 1..22: mol_type = other RNA
attttgaatgcttcctgacaat

SEQ ID NO: 9445 - RNA, 22 nt, synthetic construct
  source 1..22: mol_type = other RNA
attttgaggaatctcagacgtt

SEQ ID NO: 9446 - RNA, 22 nt, synthetic construct
  source 1..22: mol_type = other RNA
caaaaatgcacatctacataaa

SEQ ID NO: 9447 - RNA, 22 nt, synthetic construct
  source 1..22: mol_type = other RNA
caaaacatctctcttgcttatc

SEQ ID NO: 9448 - RNA, 22 nt, synthetic construct
  source 1..22: mol_type = other RNA
caaaaggagctttcaacaagga

SEQ ID NO: 9449 - RNA, 22 nt, synthetic construct
  source 1..22: mol_type = other RNA
caaaatcttgaccaaatgcaac

SEQ ID NO: 9450 - RNA, 22 nt, synthetic construct
  source 1..22: mol_type = other RNA
caaaatgtctgtagctcctcaa

SEQ ID NO: 9451 - RNA, 22 nt, synthetic construct
  source 1..22: mol_type = other RNA
caaaattgaccagagagagctc

SEQ ID NO: 9452 - RNA, 22 nt, synthetic construct
  source 1..22: mol_type = other RNA
caaagaatcataatggaaagaa

SEQ ID NO: 9453 - RNA, 22 nt, synthetic construct
  source 1..22: mol_type = other RNA
caaagtacagcccagtttcatt

SEQ ID NO: 9454 - RNA, 22 nt, synthetic construct
  source 1..22: mol_type = other RNA
caaagtatacttccggggtcaa

SEQ ID NO: 9455 - RNA, 22 nt, synthetic construct
  source 1..22: mol_type = other RNA
caaagtgcttctcttagagctt

SEQ ID NO: 9456 - RNA, 22 nt, synthetic construct
  source 1..22: mol_type = other RNA
caaatgcaacccatattttcct

SEQ ID NO: 9457 - RNA, 22 nt, synthetic construct
  source 1..22: mol_type = other RNA
caaatgcatgtaagaagaccct

SEQ ID NO: 9458 - RNA, 22 nt, synthetic construct
  source 1..22: mol_type = other RNA
caaatggaggaatatgacggaa

SEQ ID NO: 9459 - RNA, 22 nt, synthetic construct
  source 1..22: mol_type = other RNA
caacaacctgcccctgagccac

SEQ ID NO: 9460 - RNA, 22 nt, synthetic construct
  source 1..22: mol_type = other RNA
caacattctcggtgcctgtaac

SEQ ID NO: 9461 - RNA, 22 nt, synthetic construct
  source 1..22: mol_type = other RNA
caaccatgtatctgaaagacag

SEQ ID NO: 9462 - RNA, 22 nt, synthetic construct
  source 1..22: mol_type = other RNA
caacccatattttcctaatatg

SEQ ID NO: 9463 - RNA, 22 nt, synthetic construct
  source 1..22: mol_type = other RNA
caacctgcccctgagccacaag

SEQ ID NO: 9464 - RNA, 22 nt, synthetic construct
  source 1..22: mol_type = other RNA
caacgtatctgagctctctctg

SEQ ID NO: 9465 - RNA, 22 nt, synthetic construct
  source 1..22: mol_type = other RNA
caactcaaggtccatgcctctg

SEQ ID NO: 9466 - RNA, 22 nt, synthetic construct
  source 1..22: mol_type = other RNA
caactcacctaatgtttatgag

SEQ ID NO: 9467 - RNA, 22 nt, synthetic construct
  source 1..22: mol_type = other RNA
caactctaatagtgcttaaaaa

SEQ ID NO: 9468 - RNA, 22 nt, synthetic construct
  source 1..22: mol_type = other RNA
caagagagatgttttggggact

SEQ ID NO: 9469 - RNA, 22 nt, synthetic construct
  source 1..22: mol_type = other RNA
caagattgaccccggaagtata

SEQ ID NO: 9470 - RNA, 22 nt, synthetic construct
  source 1..22: mol_type = other RNA
caagattttgaatgcttcctga

SEQ ID NO: 9471 - RNA, 22 nt, synthetic construct
  source 1..22: mol_type = other RNA
caagcctctagtcttccttttc

SEQ ID NO: 9472 - RNA, 22 nt, synthetic construct
  source 1..22: mol_type = other RNA
caaggccacccttcttatactt

SEQ ID NO: 9473 - RNA, 22 nt, synthetic construct
  source 1..22: mol_type = other RNA
caaggcccaccttgagaggtga

SEQ ID NO: 9474 - RNA, 22 nt, synthetic construct
  source 1..22: mol_type = other RNA
caagggggactgtctttcagat

SEQ ID NO: 9475 - RNA, 22 nt, synthetic construct
  source 1..22: mol_type = other RNA
caaggtccacttggttcatgtc

SEQ ID NO: 9476 - RNA, 22 nt, synthetic construct
  source 1..22: mol_type = other RNA
caaggtccatgcctctggaatg

SEQ ID NO: 9477 - RNA, 22 nt, synthetic construct
  source 1..22: mol_type = other RNA
caaggtctacatgaggaactct

SEQ ID NO: 9478 - RNA, 22 nt, synthetic construct
  source 1..22: mol_type = other RNA
caaggtgggccttgctacctca

SEQ ID NO: 9479 - RNA, 22 nt, synthetic construct
  source 1..22: mol_type = other RNA
caagtaagaagacatgaaccaa

SEQ ID NO: 9480 - RNA, 22 nt, synthetic construct
  source 1..22: mol_type = other RNA
caagtccaactcaaggtccatg

SEQ ID NO: 9481 - RNA, 22 nt, synthetic construct
  source 1..22: mol_type = other RNA
caagtggaccttgagaccacag

SEQ ID NO: 9482 - RNA, 22 nt, synthetic construct
  source 1..22: mol_type = other RNA
caatatctacattctctcttta

SEQ ID NO: 9483 - RNA, 22 nt, synthetic construct
  source 1..22: mol_type = other RNA
caatcaactctaatagtgctta

SEQ ID NO: 9484 - RNA, 22 nt, synthetic construct
  source 1..22: mol_type = other RNA
caatcaatgatttttaagcact

SEQ ID NO: 9485 - RNA, 22 nt, synthetic construct
  source 1..22: mol_type = other RNA
caatctgcctaaatactctcag

SEQ ID NO: 9486 - RNA, 22 nt, synthetic construct
  source 1..22: mol_type = other RNA
caatcttaccagtgctgatcat

SEQ ID NO: 9487 - RNA, 22 nt, synthetic construct
  source 1..22: mol_type = other RNA
caatcttgcaacaacctgcccc

SEQ ID NO: 9488 - RNA, 22 nt, synthetic construct
  source 1..22: mol_type = other RNA
caatgaaactgggctgtacttt

SEQ ID NO: 9489 - RNA, 22 nt, synthetic construct
  source 1..22: mol_type = other RNA
caatgccccactggcagcatct

SEQ ID NO: 9490 - RNA, 22 nt, synthetic construct
  source 1..22: mol_type = other RNA
caattccataggtgtcttccca

SEQ ID NO: 9491 - RNA, 22 nt, synthetic construct
  source 1..22: mol_type = other RNA
caattgcactggaaatacacat

SEQ ID NO: 9492 - RNA, 22 nt, synthetic construct
  source 1..22: mol_type = other RNA
caattgtaggggtgtgtgtgtg

SEQ ID NO: 9493 - RNA, 22 nt, synthetic construct
  source 1..22: mol_type = other RNA
caattttgaggaatctcagacg

SEQ ID NO: 9494 - RNA, 22 nt, synthetic construct
  source 1..22: mol_type = other RNA
cacaaaaatgcacatctacata

SEQ ID NO: 9495 - RNA, 22 nt, synthetic construct
  source 1..22: mol_type = other RNA
cacaaccatgtatctgaaagac

SEQ ID NO: 9496 - RNA, 22 nt, synthetic construct
  source 1..22: mol_type = other RNA
cacaaggccacccttcttatac

SEQ ID NO: 9497 - RNA, 22 nt, synthetic construct
  source 1..22: mol_type = other RNA
cacaaggtctacatgaggaact

SEQ ID NO: 9498 - RNA, 22 nt, synthetic construct
  source 1..22: mol_type = other RNA
cacaatatctacattctctctt

SEQ ID NO: 9499 - RNA, 22 nt, synthetic construct
  source 1..22: mol_type = other RNA
cacacacacacccctacaattg

SEQ ID NO: 9500 - RNA, 22 nt, synthetic construct
  source 1..22: mol_type = other RNA
cacacacacccctacaattgca

SEQ ID NO: 9501 - RNA, 22 nt, synthetic construct
  source 1..22: mol_type = other RNA
cacacacccctacaattgcact

SEQ ID NO: 9502 - RNA, 22 nt, synthetic construct
  source 1..22: mol_type = other RNA
cacacccctacaattgcactgg

SEQ ID NO: 9503 - RNA, 22 nt, synthetic construct
  source 1..22: mol_type = other RNA
cacagcatgtgtatttccagtg

SEQ ID NO: 9504 - RNA, 22 nt, synthetic construct
  source 1..22: mol_type = other RNA
cacagggttcaaaatgtctgta

SEQ ID NO: 9505 - RNA, 22 nt, synthetic construct
  source 1..22: mol_type = other RNA
cacatctgcccagtagtgcagt

SEQ ID NO: 9506 - RNA, 22 nt, synthetic construct
  source 1..22: mol_type = other RNA
cacatgctgtgttaggaatgaa

SEQ ID NO: 9507 - RNA, 22 nt, synthetic construct
  source 1..22: mol_type = other RNA
cacatggcagcccagagttcta

SEQ ID NO: 9508 - RNA, 22 nt, synthetic construct
  source 1..22: mol_type = other RNA
caccagatcctggggatactta

SEQ ID NO: 9509 - RNA, 22 nt, synthetic construct
  source 1..22: mol_type = other RNA
cacccctacaattgcactggaa

SEQ ID NO: 9510 - RNA, 22 nt, synthetic construct
  source 1..22: mol_type = other RNA
cacccttcttatacttcactcc

SEQ ID NO: 9511 - RNA, 22 nt, synthetic construct
  source 1..22: mol_type = other RNA
caccgagaatgttgtattcagt

SEQ ID NO: 9512 - RNA, 22 nt, synthetic construct
  source 1..22: mol_type = other RNA
caccgatggctcaggatatgca

SEQ ID NO: 9513 - RNA, 22 nt, synthetic construct
  source 1..22: mol_type = other RNA
cacctaatgtttatgagccaga

SEQ ID NO: 9514 - RNA, 22 nt, synthetic construct
  source 1..22: mol_type = other RNA
cacctatggaattgtcctgctt

SEQ ID NO: 9515 - RNA, 22 nt, synthetic construct
  source 1..22: mol_type = other RNA
cacctctcaaggtgggccttgc

SEQ ID NO: 9516 - RNA, 22 nt, synthetic construct
  source 1..22: mol_type = other RNA
cacctggtagctgctttttcat

SEQ ID NO: 9517 - RNA, 22 nt, synthetic construct
  source 1..22: mol_type = other RNA
caccttgagaggtgagttaaaa

SEQ ID NO: 9518 - RNA, 22 nt, synthetic construct
  source 1..22: mol_type = other RNA
caccttttaactcacctctcaa

SEQ ID NO: 9519 - RNA, 22 nt, synthetic construct
  source 1..22: mol_type = other RNA
cactaagatgagtgtagaacac

SEQ ID NO: 9520 - RNA, 22 nt, synthetic construct
  source 1..22: mol_type = other RNA
cactactgggcagatgtgggcc

SEQ ID NO: 9521 - RNA, 22 nt, synthetic construct
  source 1..22: mol_type = other RNA
cactattagagttgattgtcag

SEQ ID NO: 9522 - RNA, 22 nt, synthetic construct
  source 1..22: mol_type = other RNA
cactcatcttagtgcctgagag

SEQ ID NO: 9523 - RNA, 22 nt, synthetic construct
  source 1..22: mol_type = other RNA
cactccagaaagcaggacaatt

SEQ ID NO: 9524 - RNA, 22 nt, synthetic construct
  source 1..22: mol_type = other RNA
cactgaatacaacattctcggt

SEQ ID NO: 9525 - RNA, 22 nt, synthetic construct
  source 1..22: mol_type = other RNA
cactgcccccaggtagctgctg

SEQ ID NO: 9526 - RNA, 22 nt, synthetic construct
  source 1..22: mol_type = other RNA
cactggaaatacacatgctgtg

SEQ ID NO: 9527 - RNA, 22 nt, synthetic construct
  source 1..22: mol_type = other RNA
cactggcagcatcttcacttct

SEQ ID NO: 9528 - RNA, 22 nt, synthetic construct
  source 1..22: mol_type = other RNA
cactggtaagattgaacactgc

SEQ ID NO: 9529 - RNA, 22 nt, synthetic construct
  source 1..22: mol_type = other RNA
cacttctaaatgcatatcctga

SEQ ID NO: 9530 - RNA, 22 nt, synthetic construct
  source 1..22: mol_type = other RNA
cacttggttcatgtcttcttac

SEQ ID NO: 9531 - RNA, 22 nt, synthetic construct
  source 1..22: mol_type = other RNA
cactttgggattctttccatta

SEQ ID NO: 9532 - RNA, 22 nt, synthetic construct
  source 1..22: mol_type = other RNA
cagaaagcaggacaattccata

SEQ ID NO: 9533 - RNA, 22 nt, synthetic construct
  source 1..22: mol_type = other RNA
cagacaaatggaggaatatgac

SEQ ID NO: 9534 - RNA, 22 nt, synthetic construct
  source 1..22: mol_type = other RNA
cagacattttgaaccctgtggt

SEQ ID NO: 9535 - RNA, 22 nt, synthetic construct
  source 1..22: mol_type = other RNA
cagacgtttttcggcttatata

SEQ ID NO: 9536 - RNA, 22 nt, synthetic construct
  source 1..22: mol_type = other RNA
cagagagagctcagatacgttg

SEQ ID NO: 9537 - RNA, 22 nt, synthetic construct
  source 1..22: mol_type = other RNA
cagaggcatggaccttgagttg

SEQ ID NO: 9538 - RNA, 22 nt, synthetic construct
  source 1..22: mol_type = other RNA
cagagttctatgttcttccgtc

SEQ ID NO: 9539 - RNA, 22 nt, synthetic construct
  source 1..22: mol_type = other RNA
cagataagcaagagagatgttt

SEQ ID NO: 9540 - RNA, 22 nt, synthetic construct
  source 1..22: mol_type = other RNA
cagatacatggttgtgacctga

SEQ ID NO: 9541 - RNA, 22 nt, synthetic construct
  source 1..22: mol_type = other RNA
cagatacgttgacatataaatg

SEQ ID NO: 9542 - RNA, 22 nt, synthetic construct
  source 1..22: mol_type = other RNA
cagatcctggggatacttagag

SEQ ID NO: 9543 - RNA, 22 nt, synthetic construct
  source 1..22: mol_type = other RNA
cagatgtgggcccgcagcagct

SEQ ID NO: 9544 - RNA, 22 nt, synthetic construct
  source 1..22: mol_type = other RNA
cagattgaaaaggacacctttt

SEQ ID NO: 9545 - RNA, 22 nt, synthetic construct
  source 1..22: mol_type = other RNA
cagcactggtaagattgaacac

SEQ ID NO: 9546 - RNA, 22 nt, synthetic construct
  source 1..22: mol_type = other RNA
cagcagctacctgggggcagtg

SEQ ID NO: 9547 - RNA, 22 nt, synthetic construct
  source 1..22: mol_type = other RNA
cagcatcttcacttctaaatgc

SEQ ID NO: 9548 - RNA, 22 nt, synthetic construct
  source 1..22: mol_type = other RNA
cagcatgtgtatttccagtgca

SEQ ID NO: 9549 - RNA, 22 nt, synthetic construct
  source 1..22: mol_type = other RNA
cagcccagagttctatgttctt

SEQ ID NO: 9550 - RNA, 22 nt, synthetic construct
  source 1..22: mol_type = other RNA
cagcccagtttcattgatcaca

SEQ ID NO: 9551 - RNA, 22 nt, synthetic construct
  source 1..22: mol_type = other RNA
cagcctctttagcttattatgc

SEQ ID NO: 9552 - RNA, 22 nt, synthetic construct
  source 1..22: mol_type = other RNA
cagctaccaggtgttctacact

SEQ ID NO: 9553 - RNA, 22 nt, synthetic construct
  source 1..22: mol_type = other RNA
cagctacctgggggcagtgttc

SEQ ID NO: 9554 - RNA, 22 nt, synthetic construct
  source 1..22: mol_type = other RNA
cagctactaatgatgttttcct

SEQ ID NO: 9555 - RNA, 22 nt, synthetic construct
  source 1..22: mol_type = other RNA
caggaagcattcaaaatcttga

SEQ ID NO: 9556 - RNA, 22 nt, synthetic construct
  source 1..22: mol_type = other RNA
caggacaattccataggtgtct

SEQ ID NO: 9557 - RNA, 22 nt, synthetic construct
  source 1..22: mol_type = other RNA
caggatatgcatttagaagtga

SEQ ID NO: 9558 - RNA, 22 nt, synthetic construct
  source 1..22: mol_type = other RNA
caggatctggtgatgatggagg

SEQ ID NO: 9559 - RNA, 22 nt, synthetic construct
  source 1..22: mol_type = other RNA
caggcaagtccaactcaaggtc

SEQ ID NO: 9560 - RNA, 22 nt, synthetic construct
  source 1..22: mol_type = other RNA
caggcaccgagaatgttgtatt

SEQ ID NO: 9561 - RNA, 22 nt, synthetic construct
  source 1..22: mol_type = other RNA
caggcactaagatgagtgtaga

SEQ ID NO: 9562 - RNA, 22 nt, synthetic construct
  source 1..22: mol_type = other RNA
caggggcaggttgttgcaagat

SEQ ID NO: 9563 - RNA, 22 nt, synthetic construct
  source 1..22: mol_type = other RNA
cagggttcaaaatgtctgtagc

SEQ ID NO: 9564 - RNA, 22 nt, synthetic construct
  source 1..22: mol_type = other RNA
caggtagctgctgcgggcccac

SEQ ID NO: 9565 - RNA, 22 nt, synthetic construct
  source 1..22: mol_type = other RNA
caggtcacaaccatgtatctga

SEQ ID NO: 9566 - RNA, 22 nt, synthetic construct
  source 1..22: mol_type = other RNA
caggtgttctacactcatctta

SEQ ID NO: 9567 - RNA, 22 nt, synthetic construct
  source 1..22: mol_type = other RNA
caggttgttgcaagattgaccc

SEQ ID NO: 9568 - RNA, 22 nt, synthetic construct
  source 1..22: mol_type = other RNA
cagtagctcatcatcttcccct

SEQ ID NO: 9569 - RNA, 22 nt, synthetic construct
  source 1..22: mol_type = other RNA
cagtagtgcagtagctcatcat

SEQ ID NO: 9570 - RNA, 22 nt, synthetic construct
  source 1..22: mol_type = other RNA
cagtcccccttgaggtagcaag

SEQ ID NO: 9571 - RNA, 22 nt, synthetic construct
  source 1..22: mol_type = other RNA
cagtgagggtcttcttacatgc

SEQ ID NO: 9572 - RNA, 22 nt, synthetic construct
  source 1..22: mol_type = other RNA
cagtgcaattgtaggggtgtgt

SEQ ID NO: 9573 - RNA, 22 nt, synthetic construct
  source 1..22: mol_type = other RNA
cagtgctgatcatttatatgtc

SEQ ID NO: 9574 - RNA, 22 nt, synthetic construct
  source 1..22: mol_type = other RNA
cagtggggcattggcctctttc

SEQ ID NO: 9575 - RNA, 22 nt, synthetic construct
  source 1..22: mol_type = other RNA
cagtgttcaatcttaccagtgc

SEQ ID NO: 9576 - RNA, 22 nt, synthetic construct
  source 1..22: mol_type = other RNA
cagtttcattgatcacaaggcc

SEQ ID NO: 9577 - RNA, 22 nt, synthetic construct
  source 1..22: mol_type = other RNA
cataaacattaggtgagttgag

SEQ ID NO: 9578 - RNA, 22 nt, synthetic construct
  source 1..22: mol_type = other RNA
cataataagctaaagaggctga

SEQ ID NO: 9579 - RNA, 22 nt, synthetic construct
  source 1..22: mol_type = other RNA
cataatggaaagaatcccaaag

SEQ ID NO: 9580 - RNA, 22 nt, synthetic construct
  source 1..22: mol_type = other RNA
catagaactctgggctgccatg

SEQ ID NO: 9581 - RNA, 22 nt, synthetic construct
  source 1..22: mol_type = other RNA
cataggtgtcttcccattccag

SEQ ID NO: 9582 - RNA, 22 nt, synthetic construct
  source 1..22: mol_type = other RNA
catataaatgatcagcactggt

SEQ ID NO: 9583 - RNA, 22 nt, synthetic construct
  source 1..22: mol_type = other RNA
catatcctgagccatcggtgaa

SEQ ID NO: 9584 - RNA, 22 nt, synthetic construct
  source 1..22: mol_type = other RNA
catattaggaaaatatgggttg

SEQ ID NO: 9585 - RNA, 22 nt, synthetic construct
  source 1..22: mol_type = other RNA
catattcctccatttgtctggc

SEQ ID NO: 9586 - RNA, 22 nt, synthetic construct
  source 1..22: mol_type = other RNA
catcaccagatcctggggatac

SEQ ID NO: 9587 - RNA, 22 nt, synthetic construct
  source 1..22: mol_type = other RNA
catcatcaccagatcctgggga

SEQ ID NO: 9588 - RNA, 22 nt, synthetic construct
  source 1..22: mol_type = other RNA
catcatcttcccctccatcatc

SEQ ID NO: 9589 - RNA, 22 nt, synthetic construct
  source 1..22: mol_type = other RNA
catcattagtagctgacaatca

SEQ ID NO: 9590 - RNA, 22 nt, synthetic construct
  source 1..22: mol_type = other RNA
catcccttaaatcctcaggtca

SEQ ID NO: 9591 - RNA, 22 nt, synthetic construct
  source 1..22: mol_type = other RNA
catcggtgaaactaacagataa

SEQ ID NO: 9592 - RNA, 22 nt, synthetic construct
  source 1..22: mol_type = other RNA
catctctcttgcttatctgtta

SEQ ID NO: 9593 - RNA, 22 nt, synthetic construct
  source 1..22: mol_type = other RNA
catctgcccagtagtgcagtag

SEQ ID NO: 9594 - RNA, 22 nt, synthetic construct
  source 1..22: mol_type = other RNA
catcttagtgcctgagagtatt

SEQ ID NO: 9595 - RNA, 22 nt, synthetic construct
  source 1..22: mol_type = other RNA
catcttcacttctaaatgcata

SEQ ID NO: 9596 - RNA, 22 nt, synthetic construct
  source 1..22: mol_type = other RNA
catcttcccctccatcatcacc

SEQ ID NO: 9597 - RNA, 22 nt, synthetic construct
  source 1..22: mol_type = other RNA
catgaaaaagcagctaccaggt

SEQ ID NO: 9598 - RNA, 22 nt, synthetic construct
  source 1..22: mol_type = other RNA
catgaaccaagtggaccttgag

SEQ ID NO: 9599 - RNA, 22 nt, synthetic construct
  source 1..22: mol_type = other RNA
catgactattccttgttgaaag

SEQ ID NO: 9600 - RNA, 22 nt, synthetic construct
  source 1..22: mol_type = other RNA
catgaggaactctaagtatccc

SEQ ID NO: 9601 - RNA, 22 nt, synthetic construct
  source 1..22: mol_type = other RNA
catgcatttgaggtcaagtaag

SEQ ID NO: 9602 - RNA, 22 nt, synthetic construct
  source 1..22: mol_type = other RNA
catgcctctggaatgggaagac

SEQ ID NO: 9603 - RNA, 22 nt, synthetic construct
  source 1..22: mol_type = other RNA
catgctgtgttaggaatgaaat

SEQ ID NO: 9604 - RNA, 22 nt, synthetic construct
  source 1..22: mol_type = other RNA
catgcttctccctcttcacatg

SEQ ID NO: 9605 - RNA, 22 nt, synthetic construct
  source 1..22: mol_type = other RNA
catggaccttgagttggacttg

SEQ ID NO: 9606 - RNA, 22 nt, synthetic construct
  source 1..22: mol_type = other RNA
catggcagcccagagttctatg

SEQ ID NO: 9607 - RNA, 22 nt, synthetic construct
  source 1..22: mol_type = other RNA
catggttgtgacctgaggattt

SEQ ID NO: 9608 - RNA, 22 nt, synthetic construct
  source 1..22: mol_type = other RNA
catgtaagaagaccctcactga

SEQ ID NO: 9609 - RNA, 22 nt, synthetic construct
  source 1..22: mol_type = other RNA
catgtagaccttgtggctcagg

SEQ ID NO: 9610 - RNA, 22 nt, synthetic construct
  source 1..22: mol_type = other RNA
catgtatctgaaagacagtccc

SEQ ID NO: 9611 - RNA, 22 nt, synthetic construct
  source 1..22: mol_type = other RNA
catgtcttcttacttgacctca

SEQ ID NO: 9612 - RNA, 22 nt, synthetic construct
  source 1..22: mol_type = other RNA
catgtgaagagggagaagcatg

SEQ ID NO: 9613 - RNA, 22 nt, synthetic construct
  source 1..22: mol_type = other RNA
catgtgtatttccagtgcaatt

SEQ ID NO: 9614 - RNA, 22 nt, synthetic construct
  source 1..22: mol_type = other RNA
cattaggtgagttgaggagcta

SEQ ID NO: 9615 - RNA, 22 nt, synthetic construct
  source 1..22: mol_type = other RNA
cattagtagctgacaatcaatg

SEQ ID NO: 9616 - RNA, 22 nt, synthetic construct
  source 1..22: mol_type = other RNA
cattatgattctttgttacagg

SEQ ID NO: 9617 - RNA, 22 nt, synthetic construct
  source 1..22: mol_type = other RNA
cattcaaaatcttgaccaaatg

SEQ ID NO: 9618 - RNA, 22 nt, synthetic construct
  source 1..22: mol_type = other RNA
cattccagaggcatggaccttg

SEQ ID NO: 9619 - RNA, 22 nt, synthetic construct
  source 1..22: mol_type = other RNA
cattcctaacacagcatgtgta

SEQ ID NO: 9620 - RNA, 22 nt, synthetic construct
  source 1..22: mol_type = other RNA
cattctcggtgcctgtaacaaa

SEQ ID NO: 9621 - RNA, 22 nt, synthetic construct
  source 1..22: mol_type = other RNA
cattctctctttagtcatacac

SEQ ID NO: 9622 - RNA, 22 nt, synthetic construct
  source 1..22: mol_type = other RNA
cattgatcacaaggccaccctt

SEQ ID NO: 9623 - RNA, 22 nt, synthetic construct
  source 1..22: mol_type = other RNA
cattgattgtcagctactaatg

SEQ ID NO: 9624 - RNA, 22 nt, synthetic construct
  source 1..22: mol_type = other RNA
cattggcctctttcagcctctt

SEQ ID NO: 9625 - RNA, 22 nt, synthetic construct
  source 1..22: mol_type = other RNA
catttagaagtgaagatgctgc

SEQ ID NO: 9626 - RNA, 22 nt, synthetic construct
  source 1..22: mol_type = other RNA
catttatatgtcaacgtatctg

SEQ ID NO: 9627 - RNA, 22 nt, synthetic construct
  source 1..22: mol_type = other RNA
catttcacaaaaatgcacatct

SEQ ID NO: 9628 - RNA, 22 nt, synthetic construct
  source 1..22: mol_type = other RNA
catttcattcctaacacagcat

SEQ ID NO: 9629 - RNA, 22 nt, synthetic construct
  source 1..22: mol_type = other RNA
catttgaggtcaagtaagaaga

SEQ ID NO: 9630 - RNA, 22 nt, synthetic construct
  source 1..22: mol_type = other RNA
catttggtcaagattttgaatg

SEQ ID NO: 9631 - RNA, 22 nt, synthetic construct
  source 1..22: mol_type = other RNA
catttgtctggctcataaacat

SEQ ID NO: 9632 - RNA, 22 nt, synthetic construct
  source 1..22: mol_type = other RNA
cattttgaaccctgtggtctca

SEQ ID NO: 9633 - RNA, 22 nt, synthetic construct
  source 1..22: mol_type = other RNA
ccaaaacatctctcttgcttat

SEQ ID NO: 9634 - RNA, 22 nt, synthetic construct
  source 1..22: mol_type = other RNA
ccaaaaggagctttcaacaagg

SEQ ID NO: 9635 - RNA, 22 nt, synthetic construct
  source 1..22: mol_type = other RNA
ccaaagtatacttccggggtca

SEQ ID NO: 9636 - RNA, 22 nt, synthetic construct
  source 1..22: mol_type = other RNA
ccaaagtgcttctcttagagct

SEQ ID NO: 9637 - RNA, 22 nt, synthetic construct
  source 1..22: mol_type = other RNA
ccaaatgcaacccatattttcc

SEQ ID NO: 9638 - RNA, 22 nt, synthetic construct
  source 1..22: mol_type = other RNA
ccaactcaaggtccatgcctct

SEQ ID NO: 9639 - RNA, 22 nt, synthetic construct
  source 1..22: mol_type = other RNA
ccaagtggaccttgagaccaca

SEQ ID NO: 9640 - RNA, 22 nt, synthetic construct
  source 1..22: mol_type = other RNA
ccaatgccccactggcagcatc

SEQ ID NO: 9641 - RNA, 22 nt, synthetic construct
  source 1..22: mol_type = other RNA
ccacaaggtctacatgaggaac

SEQ ID NO: 9642 - RNA, 22 nt, synthetic construct
  source 1..22: mol_type = other RNA
ccacagggttcaaaatgtctgt

SEQ ID NO: 9643 - RNA, 22 nt, synthetic construct
  source 1..22: mol_type = other RNA
ccacatctgcccagtagtgcag

SEQ ID NO: 9644 - RNA, 22 nt, synthetic construct
  source 1..22: mol_type = other RNA
ccacccttcttatacttcactc

SEQ ID NO: 9645 - RNA, 22 nt, synthetic construct
  source 1..22: mol_type = other RNA
ccaccttgagaggtgagttaaa

SEQ ID NO: 9646 - RNA, 22 nt, synthetic construct
  source 1..22: mol_type = other RNA
ccactggcagcatcttcacttc

SEQ ID NO: 9647 - RNA, 22 nt, synthetic construct
  source 1..22: mol_type = other RNA
ccacttggttcatgtcttctta

SEQ ID NO: 9648 - RNA, 22 nt, synthetic construct
  source 1..22: mol_type = other RNA
ccagaaagcaggacaattccat

SEQ ID NO: 9649 - RNA, 22 nt, synthetic construct
  source 1..22: mol_type = other RNA
ccagacaaatggaggaatatga

SEQ ID NO: 9650 - RNA, 22 nt, synthetic construct
  source 1..22: mol_type = other RNA
ccagagagagctcagatacgtt

SEQ ID NO: 9651 - RNA, 22 nt, synthetic construct
  source 1..22: mol_type = other RNA
ccagaggcatggaccttgagtt

SEQ ID NO: 9652 - RNA, 22 nt, synthetic construct
  source 1..22: mol_type = other RNA
ccagagttctatgttcttccgt

SEQ ID NO: 9653 - RNA, 22 nt, synthetic construct
  source 1..22: mol_type = other RNA
ccagatcctggggatacttaga

SEQ ID NO: 9654 - RNA, 22 nt, synthetic construct
  source 1..22: mol_type = other RNA
ccaggatctggtgatgatggag

SEQ ID NO: 9655 - RNA, 22 nt, synthetic construct
  source 1..22: mol_type = other RNA
ccaggtagctgctgcgggccca

SEQ ID NO: 9656 - RNA, 22 nt, synthetic construct
  source 1..22: mol_type = other RNA
ccaggtgttctacactcatctt

SEQ ID NO: 9657 - RNA, 22 nt, synthetic construct
  source 1..22: mol_type = other RNA
ccagtagtgcagtagctcatca

SEQ ID NO: 9658 - RNA, 22 nt, synthetic construct
  source 1..22: mol_type = other RNA
ccagtgcaattgtaggggtgtg

SEQ ID NO: 9659 - RNA, 22 nt, synthetic construct
  source 1..22: mol_type = other RNA
ccagtgctgatcatttatatgt

SEQ ID NO: 9660 - RNA, 22 nt, synthetic construct
  source 1..22: mol_type = other RNA
ccagtggggcattggcctcttt

SEQ ID NO: 9661 - RNA, 22 nt, synthetic construct
  source 1..22: mol_type = other RNA
ccagtttcattgatcacaaggc

SEQ ID NO: 9662 - RNA, 22 nt, synthetic construct
  source 1..22: mol_type = other RNA
ccataggtgtcttcccattcca

SEQ ID NO: 9663 - RNA, 22 nt, synthetic construct
  source 1..22: mol_type = other RNA
ccatattttcctaatatgtact

SEQ ID NO: 9664 - RNA, 22 nt, synthetic construct
  source 1..22: mol_type = other RNA
ccatcatcaccagatcctgggg

SEQ ID NO: 9665 - RNA, 22 nt, synthetic construct
  source 1..22: mol_type = other RNA
ccatcccttaaatcctcaggtc

SEQ ID NO: 9666 - RNA, 22 nt, synthetic construct
  source 1..22: mol_type = other RNA
ccatcggtgaaactaacagata

SEQ ID NO: 9667 - RNA, 22 nt, synthetic construct
  source 1..22: mol_type = other RNA
ccatgcctctggaatgggaaga

SEQ ID NO: 9668 - RNA, 22 nt, synthetic construct
  source 1..22: mol_type = other RNA
ccatgtatctgaaagacagtcc

SEQ ID NO: 9669 - RNA, 22 nt, synthetic construct
  source 1..22: mol_type = other RNA
ccatgtgaagagggagaagcat

SEQ ID NO: 9670 - RNA, 22 nt, synthetic construct
  source 1..22: mol_type = other RNA
ccattatgattctttgttacag

SEQ ID NO: 9671 - RNA, 22 nt, synthetic construct
  source 1..22: mol_type = other RNA
ccattccagaggcatggacctt

SEQ ID NO: 9672 - RNA, 22 nt, synthetic construct
  source 1..22: mol_type = other RNA
ccatttgtctggctcataaaca

SEQ ID NO: 9673 - RNA, 22 nt, synthetic construct
  source 1..22: mol_type = other RNA
cccaaaacatctctcttgctta

SEQ ID NO: 9674 - RNA, 22 nt, synthetic construct
  source 1..22: mol_type = other RNA
cccaaagtgcttctcttagagc

SEQ ID NO: 9675 - RNA, 22 nt, synthetic construct
  source 1..22: mol_type = other RNA
cccacatctgcccagtagtgca

SEQ ID NO: 9676 - RNA, 22 nt, synthetic construct
  source 1..22: mol_type = other RNA
cccaccttgagaggtgagttaa

SEQ ID NO: 9677 - RNA, 22 nt, synthetic construct
  source 1..22: mol_type = other RNA
cccactggcagcatcttcactt

SEQ ID NO: 9678 - RNA, 22 nt, synthetic construct
  source 1..22: mol_type = other RNA
cccagagttctatgttcttccg

SEQ ID NO: 9679 - RNA, 22 nt, synthetic construct
  source 1..22: mol_type = other RNA
cccaggatctggtgatgatgga

SEQ ID NO: 9680 - RNA, 22 nt, synthetic construct
  source 1..22: mol_type = other RNA
cccaggtagctgctgcgggccc

SEQ ID NO: 9681 - RNA, 22 nt, synthetic construct
  source 1..22: mol_type = other RNA
cccagtagtgcagtagctcatc

SEQ ID NO: 9682 - RNA, 22 nt, synthetic construct
  source 1..22: mol_type = other RNA
cccagtttcattgatcacaagg

SEQ ID NO: 9683 - RNA, 22 nt, synthetic construct
  source 1..22: mol_type = other RNA
cccatattttcctaatatgtac

SEQ ID NO: 9684 - RNA, 22 nt, synthetic construct
  source 1..22: mol_type = other RNA
cccattccagaggcatggacct

SEQ ID NO: 9685 - RNA, 22 nt, synthetic construct
  source 1..22: mol_type = other RNA
ccccaaaacatctctcttgctt

SEQ ID NO: 9686 - RNA, 22 nt, synthetic construct
  source 1..22: mol_type = other RNA
ccccactggcagcatcttcact

SEQ ID NO: 9687 - RNA, 22 nt, synthetic construct
  source 1..22: mol_type = other RNA
ccccaggatctggtgatgatgg

SEQ ID NO: 9688 - RNA, 22 nt, synthetic construct
  source 1..22: mol_type = other RNA
ccccaggtagctgctgcgggcc

SEQ ID NO: 9689 - RNA, 22 nt, synthetic construct
  source 1..22: mol_type = other RNA
cccccaggtagctgctgcgggc

SEQ ID NO: 9690 - RNA, 22 nt, synthetic construct
  source 1..22: mol_type = other RNA
cccccttgaggtagcaaggccc

SEQ ID NO: 9691 - RNA, 22 nt, synthetic construct
  source 1..22: mol_type = other RNA
ccccggaagtatactttggaat

SEQ ID NO: 9692 - RNA, 22 nt, synthetic construct
  source 1..22: mol_type = other RNA
cccctacaattgcactggaaat

SEQ ID NO: 9693 - RNA, 22 nt, synthetic construct
  source 1..22: mol_type = other RNA
cccctccatcatcaccagatcc

SEQ ID NO: 9694 - RNA, 22 nt, synthetic construct
  source 1..22: mol_type = other RNA
cccctgagccacaaggtctaca

SEQ ID NO: 9695 - RNA, 22 nt, synthetic construct
  source 1..22: mol_type = other RNA
ccccttgaggtagcaaggccca

SEQ ID NO: 9696 - RNA, 22 nt, synthetic construct
  source 1..22: mol_type = other RNA
cccgcagcagctacctgggggc

SEQ ID NO: 9697 - RNA, 22 nt, synthetic construct
  source 1..22: mol_type = other RNA
cccggaagtatactttggaata

SEQ ID NO: 9698 - RNA, 22 nt, synthetic construct
  source 1..22: mol_type = other RNA
ccctacaattgcactggaaata

SEQ ID NO: 9699 - RNA, 22 nt, synthetic construct
  source 1..22: mol_type = other RNA
ccctcactgaatacaacattct

SEQ ID NO: 9700 - RNA, 22 nt, synthetic construct
  source 1..22: mol_type = other RNA
ccctccatcatcaccagatcct

SEQ ID NO: 9701 - RNA, 22 nt, synthetic construct
  source 1..22: mol_type = other RNA
ccctcttcacatggcagcccag

SEQ ID NO: 9702 - RNA, 22 nt, synthetic construct
  source 1..22: mol_type = other RNA
ccctgagccacaaggtctacat

SEQ ID NO: 9703 - RNA, 22 nt, synthetic construct
  source 1..22: mol_type = other RNA
ccctgtggtctcaaggtccact

SEQ ID NO: 9704 - RNA, 22 nt, synthetic construct
  source 1..22: mol_type = other RNA
cccttaaatcctcaggtcacaa

SEQ ID NO: 9705 - RNA, 22 nt, synthetic construct
  source 1..22: mol_type = other RNA
cccttcttatacttcactccag

SEQ ID NO: 9706 - RNA, 22 nt, synthetic construct
  source 1..22: mol_type = other RNA
cccttgaggtagcaaggcccac

SEQ ID NO: 9707 - RNA, 22 nt, synthetic construct
  source 1..22: mol_type = other RNA
ccgaaaaacgtctgagattcct

SEQ ID NO: 9708 - RNA, 22 nt, synthetic construct
  source 1..22: mol_type = other RNA
ccgagaatgttgtattcagtga

SEQ ID NO: 9709 - RNA, 22 nt, synthetic construct
  source 1..22: mol_type = other RNA
ccgatggctcaggatatgcatt

SEQ ID NO: 9710 - RNA, 22 nt, synthetic construct
  source 1..22: mol_type = other RNA
ccgcagcagctacctgggggca

SEQ ID NO: 9711 - RNA, 22 nt, synthetic construct
  source 1..22: mol_type = other RNA
ccggaagtatactttggaatat

SEQ ID NO: 9712 - RNA, 22 nt, synthetic construct
  source 1..22: mol_type = other RNA
ccggggtcaatcttgcaacaac

SEQ ID NO: 9713 - RNA, 22 nt, synthetic construct
  source 1..22: mol_type = other RNA
ccgtcatattcctccatttgtc

SEQ ID NO: 9714 - RNA, 22 nt, synthetic construct
  source 1..22: mol_type = other RNA
cctaaatactctcaggcactaa

SEQ ID NO: 9715 - RNA, 22 nt, synthetic construct
  source 1..22: mol_type = other RNA
cctaacacagcatgtgtatttc

SEQ ID NO: 9716 - RNA, 22 nt, synthetic construct
  source 1..22: mol_type = other RNA
cctaatatgtacttcacaatat

SEQ ID NO: 9717 - RNA, 22 nt, synthetic construct
  source 1..22: mol_type = other RNA
cctaatgtttatgagccagaca

SEQ ID NO: 9718 - RNA, 22 nt, synthetic construct
  source 1..22: mol_type = other RNA
cctacaattgcactggaaatac

SEQ ID NO: 9719 - RNA, 22 nt, synthetic construct
  source 1..22: mol_type = other RNA
cctatggaattgtcctgctttc

SEQ ID NO: 9720 - RNA, 22 nt, synthetic construct
  source 1..22: mol_type = other RNA
cctcaaaattgaccagagagag

SEQ ID NO: 9721 - RNA, 22 nt, synthetic construct
  source 1..22: mol_type = other RNA
cctcaaatgcatgtaagaagac

SEQ ID NO: 9722 - RNA, 22 nt, synthetic construct
  source 1..22: mol_type = other RNA
cctcaactcacctaatgtttat

SEQ ID NO: 9723 - RNA, 22 nt, synthetic construct
  source 1..22: mol_type = other RNA
cctcaagggggactgtctttca

SEQ ID NO: 9724 - RNA, 22 nt, synthetic construct
  source 1..22: mol_type = other RNA
cctcactgaatacaacattctc

SEQ ID NO: 9725 - RNA, 22 nt, synthetic construct
  source 1..22: mol_type = other RNA
cctcaggtcacaaccatgtatc

SEQ ID NO: 9726 - RNA, 22 nt, synthetic construct
  source 1..22: mol_type = other RNA
cctcatgtagaccttgtggctc

SEQ ID NO: 9727 - RNA, 22 nt, synthetic construct
  source 1..22: mol_type = other RNA
cctccatcatcaccagatcctg

SEQ ID NO: 9728 - RNA, 22 nt, synthetic construct
  source 1..22: mol_type = other RNA
cctccatttgtctggctcataa

SEQ ID NO: 9729 - RNA, 22 nt, synthetic construct
  source 1..22: mol_type = other RNA
cctctagtcttccttttccatc

SEQ ID NO: 9730 - RNA, 22 nt, synthetic construct
  source 1..22: mol_type = other RNA
cctctcaaggtgggccttgcta

SEQ ID NO: 9731 - RNA, 22 nt, synthetic construct
  source 1..22: mol_type = other RNA
cctctggaatgggaagacacct

SEQ ID NO: 9732 - RNA, 22 nt, synthetic construct
  source 1..22: mol_type = other RNA
cctcttcacatggcagcccaga

SEQ ID NO: 9733 - RNA, 22 nt, synthetic construct
  source 1..22: mol_type = other RNA
cctctttagcttattatgcaag

SEQ ID NO: 9734 - RNA, 22 nt, synthetic construct
  source 1..22: mol_type = other RNA
cctctttcagcctctttagctt

SEQ ID NO: 9735 - RNA, 22 nt, synthetic construct
  source 1..22: mol_type = other RNA
cctgaaataaatccaaaaggag

SEQ ID NO: 9736 - RNA, 22 nt, synthetic construct
  source 1..22: mol_type = other RNA
cctgacaatcaactctaatagt

SEQ ID NO: 9737 - RNA, 22 nt, synthetic construct
  source 1..22: mol_type = other RNA
cctgagagtatttaggcagatt

SEQ ID NO: 9738 - RNA, 22 nt, synthetic construct
  source 1..22: mol_type = other RNA
cctgagccacaaggtctacatg

SEQ ID NO: 9739 - RNA, 22 nt, synthetic construct
  source 1..22: mol_type = other RNA
cctgagccatcggtgaaactaa

SEQ ID NO: 9740 - RNA, 22 nt, synthetic construct
  source 1..22: mol_type = other RNA
cctgaggatttaagggatggaa

SEQ ID NO: 9741 - RNA, 22 nt, synthetic construct
  source 1..22: mol_type = other RNA
cctgcccctgagccacaaggtc

SEQ ID NO: 9742 - RNA, 22 nt, synthetic construct
  source 1..22: mol_type = other RNA
cctgctttctggagtgaagtat

SEQ ID NO: 9743 - RNA, 22 nt, synthetic construct
  source 1..22: mol_type = other RNA
cctggggatacttagagttcct

SEQ ID NO: 9744 - RNA, 22 nt, synthetic construct
  source 1..22: mol_type = other RNA
cctgggggcagtgttcaatctt

SEQ ID NO: 9745 - RNA, 22 nt, synthetic construct
  source 1..22: mol_type = other RNA
cctggtagctgctttttcatgc

SEQ ID NO: 9746 - RNA, 22 nt, synthetic construct
  source 1..22: mol_type = other RNA
cctgtaacaaagaatcataatg

SEQ ID NO: 9747 - RNA, 22 nt, synthetic construct
  source 1..22: mol_type = other RNA
cctgtggtctcaaggtccactt

SEQ ID NO: 9748 - RNA, 22 nt, synthetic construct
  source 1..22: mol_type = other RNA
ccttaaatcctcaggtcacaac

SEQ ID NO: 9749 - RNA, 22 nt, synthetic construct
  source 1..22: mol_type = other RNA
ccttcttatacttcactccaga

SEQ ID NO: 9750 - RNA, 22 nt, synthetic construct
  source 1..22: mol_type = other RNA
ccttgagaccacagggttcaaa

SEQ ID NO: 9751 - RNA, 22 nt, synthetic construct
  source 1..22: mol_type = other RNA
ccttgagaggtgagttaaaagg

SEQ ID NO: 9752 - RNA, 22 nt, synthetic construct
  source 1..22: mol_type = other RNA
ccttgaggtagcaaggcccacc

SEQ ID NO: 9753 - RNA, 22 nt, synthetic construct
  source 1..22: mol_type = other RNA
ccttgagttggacttgcctgaa

SEQ ID NO: 9754 - RNA, 22 nt, synthetic construct
  source 1..22: mol_type = other RNA
ccttgctacctcaagggggact

SEQ ID NO: 9755 - RNA, 22 nt, synthetic construct
  source 1..22: mol_type = other RNA
ccttgtgatcaatgaaactggg

SEQ ID NO: 9756 - RNA, 22 nt, synthetic construct
  source 1..22: mol_type = other RNA
ccttgtggctcaggggcaggtt

SEQ ID NO: 9757 - RNA, 22 nt, synthetic construct
  source 1..22: mol_type = other RNA
ccttgttgaaagctccttttgg

SEQ ID NO: 9758 - RNA, 22 nt, synthetic construct
  source 1..22: mol_type = other RNA
ccttttaactcacctctcaagg

SEQ ID NO: 9759 - RNA, 22 nt, synthetic construct
  source 1..22: mol_type = other RNA
ccttttcaatctgcctaaatac

SEQ ID NO: 9760 - RNA, 22 nt, synthetic construct
  source 1..22: mol_type = other RNA
ccttttccatcccttaaatcct

SEQ ID NO: 9761 - RNA, 22 nt, synthetic construct
  source 1..22: mol_type = other RNA
ccttttggatttatttcaggca

SEQ ID NO: 9762 - RNA, 22 nt, synthetic construct
  source 1..22: mol_type = other RNA
cgaaaaacgtctgagattcctc

SEQ ID NO: 9763 - RNA, 22 nt, synthetic construct
  source 1..22: mol_type = other RNA
cgagaatgttgtattcagtgag

SEQ ID NO: 9764 - RNA, 22 nt, synthetic construct
  source 1..22: mol_type = other RNA
cgatggctcaggatatgcattt

SEQ ID NO: 9765 - RNA, 22 nt, synthetic construct
  source 1..22: mol_type = other RNA
cgcagcagctacctgggggcag

SEQ ID NO: 9766 - RNA, 22 nt, synthetic construct
  source 1..22: mol_type = other RNA
cggaagaacatagaactctggg

SEQ ID NO: 9767 - RNA, 22 nt, synthetic construct
  source 1..22: mol_type = other RNA
cggaagtatactttggaatata

SEQ ID NO: 9768 - RNA, 22 nt, synthetic construct
  source 1..22: mol_type = other RNA
cggcttatataagctctaagag

SEQ ID NO: 9769 - RNA, 22 nt, synthetic construct
  source 1..22: mol_type = other RNA
cgggcccacatctgcccagtag

SEQ ID NO: 9770 - RNA, 22 nt, synthetic construct
  source 1..22: mol_type = other RNA
cggggtcaatcttgcaacaacc

SEQ ID NO: 9771 - RNA, 22 nt, synthetic construct
  source 1..22: mol_type = other RNA
cggtgaaactaacagataagca

SEQ ID NO: 9772 - RNA, 22 nt, synthetic construct
  source 1..22: mol_type = other RNA
cggtgcctgtaacaaagaatca

SEQ ID NO: 9773 - RNA, 22 nt, synthetic construct
  source 1..22: mol_type = other RNA
cgtatctgagctctctctggtc

SEQ ID NO: 9774 - RNA, 22 nt, synthetic construct
  source 1..22: mol_type = other RNA
cgtcatattcctccatttgtct

SEQ ID NO: 9775 - RNA, 22 nt, synthetic construct
  source 1..22: mol_type = other RNA
cgtctgagattcctcaaaattg

SEQ ID NO: 9776 - RNA, 22 nt, synthetic construct
  source 1..22: mol_type = other RNA
cgttgacatataaatgatcagc

SEQ ID NO: 9777 - RNA, 22 nt, synthetic construct
  source 1..22: mol_type = other RNA
cgtttttcggcttatataagct

SEQ ID NO: 9778 - RNA, 22 nt, synthetic construct
  source 1..22: mol_type = other RNA
ctaaagagagaatgtagatatt

SEQ ID NO: 9779 - RNA, 22 nt, synthetic construct
  source 1..22: mol_type = other RNA
ctaaagaggctgaaagaggcca

SEQ ID NO: 9780 - RNA, 22 nt, synthetic construct
  source 1..22: mol_type = other RNA
ctaaatactctcaggcactaag

SEQ ID NO: 9781 - RNA, 22 nt, synthetic construct
  source 1..22: mol_type = other RNA
ctaaatgcatatcctgagccat

SEQ ID NO: 9782 - RNA, 22 nt, synthetic construct
  source 1..22: mol_type = other RNA
ctaacacagcatgtgtatttcc

SEQ ID NO: 9783 - RNA, 22 nt, synthetic construct
  source 1..22: mol_type = other RNA
ctaacagataagcaagagagat

SEQ ID NO: 9784 - RNA, 22 nt, synthetic construct
  source 1..22: mol_type = other RNA
ctaagagaagcactttgggatt

SEQ ID NO: 9785 - RNA, 22 nt, synthetic construct
  source 1..22: mol_type = other RNA
ctaagatgagtgtagaacacct

SEQ ID NO: 9786 - RNA, 22 nt, synthetic construct
  source 1..22: mol_type = other RNA
ctaagtatccccaggatctggt

SEQ ID NO: 9787 - RNA, 22 nt, synthetic construct
  source 1..22: mol_type = other RNA
ctaatatgtacttcacaatatc

SEQ ID NO: 9788 - RNA, 22 nt, synthetic construct
  source 1..22: mol_type = other RNA
ctaatgtttatgagccagacaa

SEQ ID NO: 9789 - RNA, 22 nt, synthetic construct
  source 1..22: mol_type = other RNA
ctacaattgcactggaaataca

SEQ ID NO: 9790 - RNA, 22 nt, synthetic construct
  source 1..22: mol_type = other RNA
ctacactcatcttagtgcctga

SEQ ID NO: 9791 - RNA, 22 nt, synthetic construct
  source 1..22: mol_type = other RNA
ctacagacattttgaaccctgt

SEQ ID NO: 9792 - RNA, 22 nt, synthetic construct
  source 1..22: mol_type = other RNA
ctacatgaggaactctaagtat

SEQ ID NO: 9793 - RNA, 22 nt, synthetic construct
  source 1..22: mol_type = other RNA
ctacattctctctttagtcata

SEQ ID NO: 9794 - RNA, 22 nt, synthetic construct
  source 1..22: mol_type = other RNA
ctaccaggtgttctacactcat

SEQ ID NO: 9795 - RNA, 22 nt, synthetic construct
  source 1..22: mol_type = other RNA
ctacctcaagggggactgtctt

SEQ ID NO: 9796 - RNA, 22 nt, synthetic construct
  source 1..22: mol_type = other RNA
ctacctgggggcagtgttcaat

SEQ ID NO: 9797 - RNA, 22 nt, synthetic construct
  source 1..22: mol_type = other RNA
ctactaatgatgttttcctata

SEQ ID NO: 9798 - RNA, 22 nt, synthetic construct
  source 1..22: mol_type = other RNA
ctactgcactactgggcagatg

SEQ ID NO: 9799 - RNA, 22 nt, synthetic construct
  source 1..22: mol_type = other RNA
ctactgggcagatgtgggcccg

SEQ ID NO: 9800 - RNA, 22 nt, synthetic construct
  source 1..22: mol_type = other RNA
ctagaggcttgcataataagct

SEQ ID NO: 9801 - RNA, 22 nt, synthetic construct
  source 1..22: mol_type = other RNA
ctagtcttccttttccatccct

SEQ ID NO: 9802 - RNA, 22 nt, synthetic construct
  source 1..22: mol_type = other RNA
ctatggaattgtcctgctttct

SEQ ID NO: 9803 - RNA, 22 nt, synthetic construct
  source 1..22: mol_type = other RNA
ctatgttcttccgtcatattcc

SEQ ID NO: 9804 - RNA, 22 nt, synthetic construct
  source 1..22: mol_type = other RNA
ctattagagttgattgtcagga

SEQ ID NO: 9805 - RNA, 22 nt, synthetic construct
  source 1..22: mol_type = other RNA
ctattccttgttgaaagctcct

SEQ ID NO: 9806 - RNA, 22 nt, synthetic construct
  source 1..22: mol_type = other RNA
ctcaaaattgaccagagagagc

SEQ ID NO: 9807 - RNA, 22 nt, synthetic construct
  source 1..22: mol_type = other RNA
ctcaaatgcatgtaagaagacc

SEQ ID NO: 9808 - RNA, 22 nt, synthetic construct
  source 1..22: mol_type = other RNA
ctcaactcacctaatgtttatg

SEQ ID NO: 9809 - RNA, 22 nt, synthetic construct
  source 1..22: mol_type = other RNA
ctcaagggggactgtctttcag

SEQ ID NO: 9810 - RNA, 22 nt, synthetic construct
  source 1..22: mol_type = other RNA
ctcaaggtccacttggttcatg

SEQ ID NO: 9811 - RNA, 22 nt, synthetic construct
  source 1..22: mol_type = other RNA
ctcaaggtccatgcctctggaa

SEQ ID NO: 9812 - RNA, 22 nt, synthetic construct
  source 1..22: mol_type = other RNA
ctcaaggtgggccttgctacct

SEQ ID NO: 9813 - RNA, 22 nt, synthetic construct
  source 1..22: mol_type = other RNA
ctcacctaatgtttatgagcca

SEQ ID NO: 9814 - RNA, 22 nt, synthetic construct
  source 1..22: mol_type = other RNA
ctcacctctcaaggtgggcctt

SEQ ID NO: 9815 - RNA, 22 nt, synthetic construct
  source 1..22: mol_type = other RNA
ctcactgaatacaacattctcg

SEQ ID NO: 9816 - RNA, 22 nt, synthetic construct
  source 1..22: mol_type = other RNA
ctcagacgtttttcggcttata

SEQ ID NO: 9817 - RNA, 22 nt, synthetic construct
  source 1..22: mol_type = other RNA
ctcagatacgttgacatataaa

SEQ ID NO: 9818 - RNA, 22 nt, synthetic construct
  source 1..22: mol_type = other RNA
ctcaggatatgcatttagaagt

SEQ ID NO: 9819 - RNA, 22 nt, synthetic construct
  source 1..22: mol_type = other RNA
ctcaggcactaagatgagtgta

SEQ ID NO: 9820 - RNA, 22 nt, synthetic construct
  source 1..22: mol_type = other RNA
ctcaggggcaggttgttgcaag

SEQ ID NO: 9821 - RNA, 22 nt, synthetic construct
  source 1..22: mol_type = other RNA
ctcaggtcacaaccatgtatct

SEQ ID NO: 9822 - RNA, 22 nt, synthetic construct
  source 1..22: mol_type = other RNA
ctcataaacattaggtgagttg

SEQ ID NO: 9823 - RNA, 22 nt, synthetic construct
  source 1..22: mol_type = other RNA
ctcatcatcttcccctccatca

SEQ ID NO: 9824 - RNA, 22 nt, synthetic construct
  source 1..22: mol_type = other RNA
ctcatcttagtgcctgagagta

SEQ ID NO: 9825 - RNA, 22 nt, synthetic construct
  source 1..22: mol_type = other RNA
ctcatgtagaccttgtggctca

SEQ ID NO: 9826 - RNA, 22 nt, synthetic construct
  source 1..22: mol_type = other RNA
ctcatttcattcctaacacagc

SEQ ID NO: 9827 - RNA, 22 nt, synthetic construct
  source 1..22: mol_type = other RNA
ctccagaaagcaggacaattcc

SEQ ID NO: 9828 - RNA, 22 nt, synthetic construct
  source 1..22: mol_type = other RNA
ctccatcatcaccagatcctgg

SEQ ID NO: 9829 - RNA, 22 nt, synthetic construct
  source 1..22: mol_type = other RNA
ctccatttgtctggctcataaa

SEQ ID NO: 9830 - RNA, 22 nt, synthetic construct
  source 1..22: mol_type = other RNA
ctccctcttcacatggcagccc

SEQ ID NO: 9831 - RNA, 22 nt, synthetic construct
  source 1..22: mol_type = other RNA
ctcctcaactcacctaatgttt

SEQ ID NO: 9832 - RNA, 22 nt, synthetic construct
  source 1..22: mol_type = other RNA
ctccttttggatttatttcagg

SEQ ID NO: 9833 - RNA, 22 nt, synthetic construct
  source 1..22: mol_type = other RNA
ctcggtgcctgtaacaaagaat

SEQ ID NO: 9834 - RNA, 22 nt, synthetic construct
  source 1..22: mol_type = other RNA
ctctaagagaagcactttggga

SEQ ID NO: 9835 - RNA, 22 nt, synthetic construct
  source 1..22: mol_type = other RNA
ctctaagtatccccaggatctg

SEQ ID NO: 9836 - RNA, 22 nt, synthetic construct
  source 1..22: mol_type = other RNA
ctctaatagtgcttaaaaatca

SEQ ID NO: 9837 - RNA, 22 nt, synthetic construct
  source 1..22: mol_type = other RNA
ctctagtcttccttttccatcc

SEQ ID NO: 9838 - RNA, 22 nt, synthetic construct
  source 1..22: mol_type = other RNA
ctctcaaggtgggccttgctac

SEQ ID NO: 9839 - RNA, 22 nt, synthetic construct
  source 1..22: mol_type = other RNA
ctctcaggcactaagatgagtg

SEQ ID NO: 9840 - RNA, 22 nt, synthetic construct
  source 1..22: mol_type = other RNA
ctctctctggtcaattttgagg

SEQ ID NO: 9841 - RNA, 22 nt, synthetic construct
  source 1..22: mol_type = other RNA
ctctctggtcaattttgaggaa

SEQ ID NO: 9842 - RNA, 22 nt, synthetic construct
  source 1..22: mol_type = other RNA
ctctcttgcttatctgttagtt

SEQ ID NO: 9843 - RNA, 22 nt, synthetic construct
  source 1..22: mol_type = other RNA
ctctctttagtcatacacacac

SEQ ID NO: 9844 - RNA, 22 nt, synthetic construct
  source 1..22: mol_type = other RNA
ctctggaatgggaagacaccta

SEQ ID NO: 9845 - RNA, 22 nt, synthetic construct
  source 1..22: mol_type = other RNA
ctctgggctgccatgtgaagag

SEQ ID NO: 9846 - RNA, 22 nt, synthetic construct
  source 1..22: mol_type = other RNA
ctctggtcaattttgaggaatc

SEQ ID NO: 9847 - RNA, 22 nt, synthetic construct
  source 1..22: mol_type = other RNA
ctcttagagcttatataagccg

SEQ ID NO: 9848 - RNA, 22 nt, synthetic construct
  source 1..22: mol_type = other RNA
ctcttcacatggcagcccagag

SEQ ID NO: 9849 - RNA, 22 nt, synthetic construct
  source 1..22: mol_type = other RNA
ctcttgcttatctgttagtttc

SEQ ID NO: 9850 - RNA, 22 nt, synthetic construct
  source 1..22: mol_type = other RNA
ctctttagcttattatgcaagc

SEQ ID NO: 9851 - RNA, 22 nt, synthetic construct
  source 1..22: mol_type = other RNA
ctctttagtcatacacacacac

SEQ ID NO: 9852 - RNA, 22 nt, synthetic construct
  source 1..22: mol_type = other RNA
ctctttcagcctctttagctta

SEQ ID NO: 9853 - RNA, 22 nt, synthetic construct
  source 1..22: mol_type = other RNA
ctgaaagacagtcccccttgag

SEQ ID NO: 9854 - RNA, 22 nt, synthetic construct
  source 1..22: mol_type = other RNA
ctgaaagaggccaatgccccac

SEQ ID NO: 9855 - RNA, 22 nt, synthetic construct
  source 1..22: mol_type = other RNA
ctgaaataaatccaaaaggagc

SEQ ID NO: 9856 - RNA, 22 nt, synthetic construct
  source 1..22: mol_type = other RNA
ctgaatacaacattctcggtgc

SEQ ID NO: 9857 - RNA, 22 nt, synthetic construct
  source 1..22: mol_type = other RNA
ctgacaatcaactctaatagtg

SEQ ID NO: 9858 - RNA, 22 nt, synthetic construct
  source 1..22: mol_type = other RNA
ctgacaatcaatgatttttaag

SEQ ID NO: 9859 - RNA, 22 nt, synthetic construct
  source 1..22: mol_type = other RNA
ctgagagtatttaggcagattg

SEQ ID NO: 9860 - RNA, 22 nt, synthetic construct
  source 1..22: mol_type = other RNA
ctgagattcctcaaaattgacc

SEQ ID NO: 9861 - RNA, 22 nt, synthetic construct
  source 1..22: mol_type = other RNA
ctgagccacaaggtctacatga

SEQ ID NO: 9862 - RNA, 22 nt, synthetic construct
  source 1..22: mol_type = other RNA
ctgagccatcggtgaaactaac

SEQ ID NO: 9863 - RNA, 22 nt, synthetic construct
  source 1..22: mol_type = other RNA
ctgagctctctctggtcaattt

SEQ ID NO: 9864 - RNA, 22 nt, synthetic construct
  source 1..22: mol_type = other RNA
ctgaggatttaagggatggaaa

SEQ ID NO: 9865 - RNA, 22 nt, synthetic construct
  source 1..22: mol_type = other RNA
ctgatcatttatatgtcaacgt

SEQ ID NO: 9866 - RNA, 22 nt, synthetic construct
  source 1..22: mol_type = other RNA
ctgcactactgggcagatgtgg

SEQ ID NO: 9867 - RNA, 22 nt, synthetic construct
  source 1..22: mol_type = other RNA
ctgccagtggggcattggcctc

SEQ ID NO: 9868 - RNA, 22 nt, synthetic construct
  source 1..22: mol_type = other RNA
ctgccatgtgaagagggagaag

SEQ ID NO: 9869 - RNA, 22 nt, synthetic construct
  source 1..22: mol_type = other RNA
ctgcccagtagtgcagtagctc

SEQ ID NO: 9870 - RNA, 22 nt, synthetic construct
  source 1..22: mol_type = other RNA
ctgcccccaggtagctgctgcg

SEQ ID NO: 9871 - RNA, 22 nt, synthetic construct
  source 1..22: mol_type = other RNA
ctgcccctgagccacaaggtct

SEQ ID NO: 9872 - RNA, 22 nt, synthetic construct
  source 1..22: mol_type = other RNA
ctgcctaaatactctcaggcac

SEQ ID NO: 9873 - RNA, 22 nt, synthetic construct
  source 1..22: mol_type = other RNA
ctgcgggcccacatctgcccag

SEQ ID NO: 9874 - RNA, 22 nt, synthetic construct
  source 1..22: mol_type = other RNA
ctgctgcgggcccacatctgcc

SEQ ID NO: 9875 - RNA, 22 nt, synthetic construct
  source 1..22: mol_type = other RNA
ctgctttctggagtgaagtata

SEQ ID NO: 9876 - RNA, 22 nt, synthetic construct
  source 1..22: mol_type = other RNA
ctgctttttcatgcttctccct

SEQ ID NO: 9877 - RNA, 22 nt, synthetic construct
  source 1..22: mol_type = other RNA
ctggaaatacacatgctgtgtt

SEQ ID NO: 9878 - RNA, 22 nt, synthetic construct
  source 1..22: mol_type = other RNA
ctggaatgggaagacacctatg

SEQ ID NO: 9879 - RNA, 22 nt, synthetic construct
  source 1..22: mol_type = other RNA
ctggagtgaagtataagaaggg

SEQ ID NO: 9880 - RNA, 22 nt, synthetic construct
  source 1..22: mol_type = other RNA
ctggcagcatcttcacttctaa

SEQ ID NO: 9881 - RNA, 22 nt, synthetic construct
  source 1..22: mol_type = other RNA
ctggctcataaacattaggtga

SEQ ID NO: 9882 - RNA, 22 nt, synthetic construct
  source 1..22: mol_type = other RNA
ctgggcagatgtgggcccgcag

SEQ ID NO: 9883 - RNA, 22 nt, synthetic construct
  source 1..22: mol_type = other RNA
ctgggctgccatgtgaagaggg

SEQ ID NO: 9884 - RNA, 22 nt, synthetic construct
  source 1..22: mol_type = other RNA
ctgggctgtactttgtatattc

SEQ ID NO: 9885 - RNA, 22 nt, synthetic construct
  source 1..22: mol_type = other RNA
ctggggatacttagagttcctc

SEQ ID NO: 9886 - RNA, 22 nt, synthetic construct
  source 1..22: mol_type = other RNA
ctgggggcagtgttcaatctta

SEQ ID NO: 9887 - RNA, 22 nt, synthetic construct
  source 1..22: mol_type = other RNA
ctggtaagattgaacactgccc

SEQ ID NO: 9888 - RNA, 22 nt, synthetic construct
  source 1..22: mol_type = other RNA
ctggtagctgctttttcatgct

SEQ ID NO: 9889 - RNA, 22 nt, synthetic construct
  source 1..22: mol_type = other RNA
ctggtcaattttgaggaatctc

SEQ ID NO: 9890 - RNA, 22 nt, synthetic construct
  source 1..22: mol_type = other RNA
ctggtgatgatggaggggaaga

SEQ ID NO: 9891 - RNA, 22 nt, synthetic construct
  source 1..22: mol_type = other RNA
ctgtaacaaagaatcataatgg

SEQ ID NO: 9892 - RNA, 22 nt, synthetic construct
  source 1..22: mol_type = other RNA
ctgtactttgtatattccaaag

SEQ ID NO: 9893 - RNA, 22 nt, synthetic construct
  source 1..22: mol_type = other RNA
ctgtagctcctcaactcaccta

SEQ ID NO: 9894 - RNA, 22 nt, synthetic construct
  source 1..22: mol_type = other RNA
ctgtctttcagatacatggttg

SEQ ID NO: 9895 - RNA, 22 nt, synthetic construct
  source 1..22: mol_type = other RNA
ctgtggtctcaaggtccacttg

SEQ ID NO: 9896 - RNA, 22 nt, synthetic construct
  source 1..22: mol_type = other RNA
ctgtgttaggaatgaaatgagt

SEQ ID NO: 9897 - RNA, 22 nt, synthetic construct
  source 1..22: mol_type = other RNA
ctgttagtttcaccgatggctc

SEQ ID NO: 9898 - RNA, 22 nt, synthetic construct
  source 1..22: mol_type = other RNA
cttaaaaatcattgattgtcag

SEQ ID NO: 9899 - RNA, 22 nt, synthetic construct
  source 1..22: mol_type = other RNA
cttaaatcctcaggtcacaacc

SEQ ID NO: 9900 - RNA, 22 nt, synthetic construct
  source 1..22: mol_type = other RNA
cttacatgcatttgaggtcaag

SEQ ID NO: 9901 - RNA, 22 nt, synthetic construct
  source 1..22: mol_type = other RNA
cttaccagtgctgatcatttat

SEQ ID NO: 9902 - RNA, 22 nt, synthetic construct
  source 1..22: mol_type = other RNA
cttacttgacctcaaatgcatg

SEQ ID NO: 9903 - RNA, 22 nt, synthetic construct
  source 1..22: mol_type = other RNA
cttagagcttatataagccgaa

SEQ ID NO: 9904 - RNA, 22 nt, synthetic construct
  source 1..22: mol_type = other RNA
cttagagttcctcatgtagacc

SEQ ID NO: 9905 - RNA, 22 nt, synthetic construct
  source 1..22: mol_type = other RNA
cttagtgcctgagagtatttag

SEQ ID NO: 9906 - RNA, 22 nt, synthetic construct
  source 1..22: mol_type = other RNA
cttatacttcactccagaaagc

SEQ ID NO: 9907 - RNA, 22 nt, synthetic construct
  source 1..22: mol_type = other RNA
cttatataagccgaaaaacgtc

SEQ ID NO: 9908 - RNA, 22 nt, synthetic construct
  source 1..22: mol_type = other RNA
cttatataagctctaagagaag

SEQ ID NO: 9909 - RNA, 22 nt, synthetic construct
  source 1..22: mol_type = other RNA
cttatctgttagtttcaccgat

SEQ ID NO: 9910 - RNA, 22 nt, synthetic construct
  source 1..22: mol_type = other RNA
cttattatgcaagcctctagtc

SEQ ID NO: 9911 - RNA, 22 nt, synthetic construct
  source 1..22: mol_type = other RNA
cttcacaatatctacattctct

SEQ ID NO: 9912 - RNA, 22 nt, synthetic construct
  source 1..22: mol_type = other RNA
cttcacatggcagcccagagtt

SEQ ID NO: 9913 - RNA, 22 nt, synthetic construct
  source 1..22: mol_type = other RNA
cttcactccagaaagcaggaca

SEQ ID NO: 9914 - RNA, 22 nt, synthetic construct
  source 1..22: mol_type = other RNA
cttcacttctaaatgcatatcc

SEQ ID NO: 9915 - RNA, 22 nt, synthetic construct
  source 1..22: mol_type = other RNA
cttcccattccagaggcatgga

SEQ ID NO: 9916 - RNA, 22 nt, synthetic construct
  source 1..22: mol_type = other RNA
cttcccctccatcatcaccaga

SEQ ID NO: 9917 - RNA, 22 nt, synthetic construct
  source 1..22: mol_type = other RNA
cttccggggtcaatcttgcaac

SEQ ID NO: 9918 - RNA, 22 nt, synthetic construct
  source 1..22: mol_type = other RNA
cttccgtcatattcctccattt

SEQ ID NO: 9919 - RNA, 22 nt, synthetic construct
  source 1..22: mol_type = other RNA
cttcctgacaatcaactctaat

SEQ ID NO: 9920 - RNA, 22 nt, synthetic construct
  source 1..22: mol_type = other RNA
cttccttttccatcccttaaat

SEQ ID NO: 9921 - RNA, 22 nt, synthetic construct
  source 1..22: mol_type = other RNA
cttctaaatgcatatcctgagc

SEQ ID NO: 9922 - RNA, 22 nt, synthetic construct
  source 1..22: mol_type = other RNA
cttctccctcttcacatggcag

SEQ ID NO: 9923 - RNA, 22 nt, synthetic construct
  source 1..22: mol_type = other RNA
cttctcttagagcttatataag

SEQ ID NO: 9924 - RNA, 22 nt, synthetic construct
  source 1..22: mol_type = other RNA
cttcttacatgcatttgaggtc

SEQ ID NO: 9925 - RNA, 22 nt, synthetic construct
  source 1..22: mol_type = other RNA
cttcttacttgacctcaaatgc

SEQ ID NO: 9926 - RNA, 22 nt, synthetic construct
  source 1..22: mol_type = other RNA
cttcttatacttcactccagaa

SEQ ID NO: 9927 - RNA, 22 nt, synthetic construct
  source 1..22: mol_type = other RNA
cttgaccaaatgcaacccatat

SEQ ID NO: 9928 - RNA, 22 nt, synthetic construct
  source 1..22: mol_type = other RNA
cttgacctcaaatgcatgtaag

SEQ ID NO: 9929 - RNA, 22 nt, synthetic construct
  source 1..22: mol_type = other RNA
cttgagaccacagggttcaaaa

SEQ ID NO: 9930 - RNA, 22 nt, synthetic construct
  source 1..22: mol_type = other RNA
cttgagaggtgagttaaaaggt

SEQ ID NO: 9931 - RNA, 22 nt, synthetic construct
  source 1..22: mol_type = other RNA
cttgaggtagcaaggcccacct

SEQ ID NO: 9932 - RNA, 22 nt, synthetic construct
  source 1..22: mol_type = other RNA
cttgagttggacttgcctgaaa

SEQ ID NO: 9933 - RNA, 22 nt, synthetic construct
  source 1..22: mol_type = other RNA
cttgcaacaacctgcccctgag

SEQ ID NO: 9934 - RNA, 22 nt, synthetic construct
  source 1..22: mol_type = other RNA
cttgcataataagctaaagagg

SEQ ID NO: 9935 - RNA, 22 nt, synthetic construct
  source 1..22: mol_type = other RNA
cttgcctgaaataaatccaaaa

SEQ ID NO: 9936 - RNA, 22 nt, synthetic construct
  source 1..22: mol_type = other RNA
cttgctacctcaagggggactg

SEQ ID NO: 9937 - RNA, 22 nt, synthetic construct
  source 1..22: mol_type = other RNA
cttgcttatctgttagtttcac

SEQ ID NO: 9938 - RNA, 22 nt, synthetic construct
  source 1..22: mol_type = other RNA
cttggttcatgtcttcttactt

SEQ ID NO: 9939 - RNA, 22 nt, synthetic construct
  source 1..22: mol_type = other RNA
cttgtgatcaatgaaactgggc

SEQ ID NO: 9940 - RNA, 22 nt, synthetic construct
  source 1..22: mol_type = other RNA
cttgtggctcaggggcaggttg

SEQ ID NO: 9941 - RNA, 22 nt, synthetic construct
  source 1..22: mol_type = other RNA
cttgttgaaagctccttttgga

SEQ ID NO: 9942 - RNA, 22 nt, synthetic construct
  source 1..22: mol_type = other RNA
ctttagcttattatgcaagcct

SEQ ID NO: 9943 - RNA, 22 nt, synthetic construct
  source 1..22: mol_type = other RNA
ctttcagatacatggttgtgac

SEQ ID NO: 9944 - RNA, 22 nt, synthetic construct
  source 1..22: mol_type = other RNA
ctttcagcctctttagcttatt

SEQ ID NO: 9945 - RNA, 22 nt, synthetic construct
  source 1..22: mol_type = other RNA
ctttccattatgattctttgtt

SEQ ID NO: 9946 - RNA, 22 nt, synthetic construct
  source 1..22: mol_type = other RNA
ctttctggagtgaagtataaga

SEQ ID NO: 9947 - RNA, 22 nt, synthetic construct
  source 1..22: mol_type = other RNA
ctttggaatatacaaagtacag

SEQ ID NO: 9948 - RNA, 22 nt, synthetic construct
  source 1..22: mol_type = other RNA
ctttgggattctttccattatg

SEQ ID NO: 9949 - RNA, 22 nt, synthetic construct
  source 1..22: mol_type = other RNA
ctttgtatattccaaagtatac

SEQ ID NO: 9950 - RNA, 22 nt, synthetic construct
  source 1..22: mol_type = other RNA
ctttgttacaggcaccgagaat

SEQ ID NO: 9951 - RNA, 22 nt, synthetic construct
  source 1..22: mol_type = other RNA
cttttaactcacctctcaaggt

SEQ ID NO: 9952 - RNA, 22 nt, synthetic construct
  source 1..22: mol_type = other RNA
cttttcaatctgcctaaatact

SEQ ID NO: 9953 - RNA, 22 nt, synthetic construct
  source 1..22: mol_type = other RNA
cttttccatcccttaaatcctc

SEQ ID NO: 9954 - RNA, 22 nt, synthetic construct
  source 1..22: mol_type = other RNA
cttttggatttatttcaggcaa

SEQ ID NO: 9955 - RNA, 22 nt, synthetic construct
  source 1..22: mol_type = other RNA
ctttttcatgcttctccctctt

SEQ ID NO: 9956 - RNA, 22 nt, synthetic construct
  source 1..22: mol_type = other RNA
gaaaaacgtctgagattcctca

SEQ ID NO: 9957 - RNA, 22 nt, synthetic construct
  source 1..22: mol_type = other RNA
gaaaaagcagctaccaggtgtt

SEQ ID NO: 9958 - RNA, 22 nt, synthetic construct
  source 1..22: mol_type = other RNA
gaaaacatcattagtagctgac

SEQ ID NO: 9959 - RNA, 22 nt, synthetic construct
  source 1..22: mol_type = other RNA
gaaaaggaagactagaggcttg

SEQ ID NO: 9960 - RNA, 22 nt, synthetic construct
  source 1..22: mol_type = other RNA
gaaaaggacaccttttaactca

SEQ ID NO: 9961 - RNA, 22 nt, synthetic construct
  source 1..22: mol_type = other RNA
gaaaatatgggttgcatttggt

SEQ ID NO: 9962 - RNA, 22 nt, synthetic construct
  source 1..22: mol_type = other RNA
gaaactaacagataagcaagag

SEQ ID NO: 9963 - RNA, 22 nt, synthetic construct
  source 1..22: mol_type = other RNA
gaaactgggctgtactttgtat

SEQ ID NO: 9964 - RNA, 22 nt, synthetic construct
  source 1..22: mol_type = other RNA
gaaagaatcccaaagtgcttct

SEQ ID NO: 9965 - RNA, 22 nt, synthetic construct
  source 1..22: mol_type = other RNA
gaaagacagtcccccttgaggt

SEQ ID NO: 9966 - RNA, 22 nt, synthetic construct
  source 1..22: mol_type = other RNA
gaaagaggccaatgccccactg

SEQ ID NO: 9967 - RNA, 22 nt, synthetic construct
  source 1..22: mol_type = other RNA
gaaagcaggacaattccatagg

SEQ ID NO: 9968 - RNA, 22 nt, synthetic construct
  source 1..22: mol_type = other RNA
gaaagctccttttggatttatt

SEQ ID NO: 9969 - RNA, 22 nt, synthetic construct
  source 1..22: mol_type = other RNA
gaaataaatccaaaaggagctt

SEQ ID NO: 9970 - RNA, 22 nt, synthetic construct
  source 1..22: mol_type = other RNA
gaaatacacatgctgtgttagg

SEQ ID NO: 9971 - RNA, 22 nt, synthetic construct
  source 1..22: mol_type = other RNA
gaaatgagtccccaaaacatct

SEQ ID NO: 9972 - RNA, 22 nt, synthetic construct
  source 1..22: mol_type = other RNA
gaacacctggtagctgcttttt

SEQ ID NO: 9973 - RNA, 22 nt, synthetic construct
  source 1..22: mol_type = other RNA
gaacactgcccccaggtagctg

SEQ ID NO: 9974 - RNA, 22 nt, synthetic construct
  source 1..22: mol_type = other RNA
gaacatagaactctgggctgcc

SEQ ID NO: 9975 - RNA, 22 nt, synthetic construct
  source 1..22: mol_type = other RNA
gaaccaagtggaccttgagacc

SEQ ID NO: 9976 - RNA, 22 nt, synthetic construct
  source 1..22: mol_type = other RNA
gaaccctgtggtctcaaggtcc

SEQ ID NO: 9977 - RNA, 22 nt, synthetic construct
  source 1..22: mol_type = other RNA
gaactctaagtatccccaggat

SEQ ID NO: 9978 - RNA, 22 nt, synthetic construct
  source 1..22: mol_type = other RNA
gaactctgggctgccatgtgaa

SEQ ID NO: 9979 - RNA, 22 nt, synthetic construct
  source 1..22: mol_type = other RNA
gaagaacatagaactctgggct

SEQ ID NO: 9980 - RNA, 22 nt, synthetic construct
  source 1..22: mol_type = other RNA
gaagacacctatggaattgtcc

SEQ ID NO: 9981 - RNA, 22 nt, synthetic construct
  source 1..22: mol_type = other RNA
gaagacatgaaccaagtggacc

SEQ ID NO: 9982 - RNA, 22 nt, synthetic construct
  source 1..22: mol_type = other RNA
gaagaccctcactgaatacaac

SEQ ID NO: 9983 - RNA, 22 nt, synthetic construct
  source 1..22: mol_type = other RNA
gaagactagaggcttgcataat

SEQ ID NO: 9984 - RNA, 22 nt, synthetic construct
  source 1..22: mol_type = other RNA
gaagagggagaagcatgaaaaa

SEQ ID NO: 9985 - RNA, 22 nt, synthetic construct
  source 1..22: mol_type = other RNA
gaagatgatgagctactgcact

SEQ ID NO: 9986 - RNA, 22 nt, synthetic construct
  source 1..22: mol_type = other RNA
gaagatgctgccagtggggcat

SEQ ID NO: 9987 - RNA, 22 nt, synthetic construct
  source 1..22: mol_type = other RNA
gaagcactttgggattctttcc

SEQ ID NO: 9988 - RNA, 22 nt, synthetic construct
  source 1..22: mol_type = other RNA
gaagcatgaaaaagcagctacc

SEQ ID NO: 9989 - RNA, 22 nt, synthetic construct
  source 1..22: mol_type = other RNA
gaagcattcaaaatcttgacca

SEQ ID NO: 9990 - RNA, 22 nt, synthetic construct
  source 1..22: mol_type = other RNA
gaagggtggccttgtgatcaat

SEQ ID NO: 9991 - RNA, 22 nt, synthetic construct
  source 1..22: mol_type = other RNA
gaagtataagaagggtggcctt

SEQ ID NO: 9992 - RNA, 22 nt, synthetic construct
  source 1..22: mol_type = other RNA
gaagtatactttggaatataca

SEQ ID NO: 9993 - RNA, 22 nt, synthetic construct
  source 1..22: mol_type = other RNA
gaagtgaagatgctgccagtgg

SEQ ID NO: 9994 - RNA, 22 nt, synthetic construct
  source 1..22: mol_type = other RNA
gaatacaacattctcggtgcct

SEQ ID NO: 9995 - RNA, 22 nt, synthetic construct
  source 1..22: mol_type = other RNA
gaatatacaaagtacagcccag

SEQ ID NO: 9996 - RNA, 22 nt, synthetic construct
  source 1..22: mol_type = other RNA
gaatatgacggaagaacataga

SEQ ID NO: 9997 - RNA, 22 nt, synthetic construct
  source 1..22: mol_type = other RNA
gaatcataatggaaagaatccc

SEQ ID NO: 9998 - RNA, 22 nt, synthetic construct
  source 1..22: mol_type = other RNA
gaatcccaaagtgcttctctta

SEQ ID NO: 9999 - RNA, 22 nt, synthetic construct
  source 1..22: mol_type = other RNA
gaatctcagacgtttttcggct

SEQ ID NO: 10000 - RNA, 22 nt, synthetic construct
  source 1..22: mol_type = other RNA
gaatgaaatgagtccccaaaac

SEQ ID NO: 10001 - RNA, 22 nt, synthetic construct
  source 1..22: mol_type = other RNA
gaatgcttcctgacaatcaact

SEQ ID NO: 10002 - RNA, 22 nt, synthetic construct
  source 1..22: mol_type = other RNA
gaatgggaagacacctatggaa

SEQ ID NO: 10003 - RNA, 22 nt, synthetic construct
  source 1..22: mol_type = other RNA
gaatgtagatattgtgaagtac

SEQ ID NO: 10004 - RNA, 22 nt, synthetic construct
  source 1..22: mol_type = other RNA
gaatgttgtattcagtgagggt

SEQ ID NO: 10005 - RNA, 22 nt, synthetic construct
  source 1..22: mol_type = other RNA
gaattgtcctgctttctggagt

SEQ ID NO: 10006 - RNA, 22 nt, synthetic construct
  source 1..22: mol_type = other RNA
gacaaatggaggaatatgacgg

SEQ ID NO: 10007 - RNA, 22 nt, synthetic construct
  source 1..22: mol_type = other RNA
gacaatcaactctaatagtgct

SEQ ID NO: 10008 - RNA, 22 nt, synthetic construct
  source 1..22: mol_type = other RNA
gacaatcaatgatttttaagca

SEQ ID NO: 10009 - RNA, 22 nt, synthetic construct
  source 1..22: mol_type = other RNA
gacaattccataggtgtcttcc

SEQ ID NO: 10010 - RNA, 22 nt, synthetic construct
  source 1..22: mol_type = other RNA
gacacctatggaattgtcctgc

SEQ ID NO: 10011 - RNA, 22 nt, synthetic construct
  source 1..22: mol_type = other RNA
gacaccttttaactcacctctc

SEQ ID NO: 10012 - RNA, 22 nt, synthetic construct
  source 1..22: mol_type = other RNA
gacagtcccccttgaggtagca

SEQ ID NO: 10013 - RNA, 22 nt, synthetic construct
  source 1..22: mol_type = other RNA
gacatataaatgatcagcactg

SEQ ID NO: 10014 - RNA, 22 nt, synthetic construct
  source 1..22: mol_type = other RNA
gacatgaaccaagtggaccttg

SEQ ID NO: 10015 - RNA, 22 nt, synthetic construct
  source 1..22: mol_type = other RNA
gacattttgaaccctgtggtct

SEQ ID NO: 10016 - RNA, 22 nt, synthetic construct
  source 1..22: mol_type = other RNA
gaccaaatgcaacccatatttt

SEQ ID NO: 10017 - RNA, 22 nt, synthetic construct
  source 1..22: mol_type = other RNA
gaccacagggttcaaaatgtct

SEQ ID NO: 10018 - RNA, 22 nt, synthetic construct
  source 1..22: mol_type = other RNA
gaccagagagagctcagatacg

SEQ ID NO: 10019 - RNA, 22 nt, synthetic construct
  source 1..22: mol_type = other RNA
gaccccggaagtatactttgga

SEQ ID NO: 10020 - RNA, 22 nt, synthetic construct
  source 1..22: mol_type = other RNA
gaccctcactgaatacaacatt

SEQ ID NO: 10021 - RNA, 22 nt, synthetic construct
  source 1..22: mol_type = other RNA
gacctcaaatgcatgtaagaag

SEQ ID NO: 10022 - RNA, 22 nt, synthetic construct
  source 1..22: mol_type = other RNA
gacctgaggatttaagggatgg

SEQ ID NO: 10023 - RNA, 22 nt, synthetic construct
  source 1..22: mol_type = other RNA
gaccttgagaccacagggttca

SEQ ID NO: 10024 - RNA, 22 nt, synthetic construct
  source 1..22: mol_type = other RNA
gaccttgagttggacttgcctg

SEQ ID NO: 10025 - RNA, 22 nt, synthetic construct
  source 1..22: mol_type = other RNA
gaccttgtggctcaggggcagg

SEQ ID NO: 10026 - RNA, 22 nt, synthetic construct
  source 1..22: mol_type = other RNA
gacggaagaacatagaactctg

SEQ ID NO: 10027 - RNA, 22 nt, synthetic construct
  source 1..22: mol_type = other RNA
gacgtttttcggcttatataag

SEQ ID NO: 10028 - RNA, 22 nt, synthetic construct
  source 1..22: mol_type = other RNA
gactaaagagagaatgtagata

SEQ ID NO: 10029 - RNA, 22 nt, synthetic construct
  source 1..22: mol_type = other RNA
gactagaggcttgcataataag

SEQ ID NO: 10030 - RNA, 22 nt, synthetic construct
  source 1..22: mol_type = other RNA
gactattccttgttgaaagctc

SEQ ID NO: 10031 - RNA, 22 nt, synthetic construct
  source 1..22: mol_type = other RNA
gactcatttcattcctaacaca

SEQ ID NO: 10032 - RNA, 22 nt, synthetic construct
  source 1..22: mol_type = other RNA
gactgtctttcagatacatggt

SEQ ID NO: 10033 - RNA, 22 nt, synthetic construct
  source 1..22: mol_type = other RNA
gacttgcctgaaataaatccaa

SEQ ID NO: 10034 - RNA, 22 nt, synthetic construct
  source 1..22: mol_type = other RNA
gagaagcactttgggattcttt

SEQ ID NO: 10035 - RNA, 22 nt, synthetic construct
  source 1..22: mol_type = other RNA
gagaagcatgaaaaagcagcta

SEQ ID NO: 10036 - RNA, 22 nt, synthetic construct
  source 1..22: mol_type = other RNA
gagaatgtagatattgtgaagt

SEQ ID NO: 10037 - RNA, 22 nt, synthetic construct
  source 1..22: mol_type = other RNA
gagaatgttgtattcagtgagg

SEQ ID NO: 10038 - RNA, 22 nt, synthetic construct
  source 1..22: mol_type = other RNA
gagaccacagggttcaaaatgt

SEQ ID NO: 10039 - RNA, 22 nt, synthetic construct
  source 1..22: mol_type = other RNA
gagagaatgtagatattgtgaa

SEQ ID NO: 10040 - RNA, 22 nt, synthetic construct
  source 1..22: mol_type = other RNA
gagagagctcagatacgttgac

SEQ ID NO: 10041 - RNA, 22 nt, synthetic construct
  source 1..22: mol_type = other RNA
gagagatgttttggggactcat

SEQ ID NO: 10042 - RNA, 22 nt, synthetic construct
  source 1..22: mol_type = other RNA
gagagctcagatacgttgacat

SEQ ID NO: 10043 - RNA, 22 nt, synthetic construct
  source 1..22: mol_type = other RNA
gagaggtgagttaaaaggtgtc

SEQ ID NO: 10044 - RNA, 22 nt, synthetic construct
  source 1..22: mol_type = other RNA
gagagtatttaggcagattgaa

SEQ ID NO: 10045 - RNA, 22 nt, synthetic construct
  source 1..22: mol_type = other RNA
gagatgttttggggactcattt

SEQ ID NO: 10046 - RNA, 22 nt, synthetic construct
  source 1..22: mol_type = other RNA
gagattcctcaaaattgaccag

SEQ ID NO: 10047 - RNA, 22 nt, synthetic construct
  source 1..22: mol_type = other RNA
gagccacaaggtctacatgagg

SEQ ID NO: 10048 - RNA, 22 nt, synthetic construct
  source 1..22: mol_type = other RNA
gagccagacaaatggaggaata

SEQ ID NO: 10049 - RNA, 22 nt, synthetic construct
  source 1..22: mol_type = other RNA
gagccatcggtgaaactaacag

SEQ ID NO: 10050 - RNA, 22 nt, synthetic construct
  source 1..22: mol_type = other RNA
gagctacagacattttgaaccc

SEQ ID NO: 10051 - RNA, 22 nt, synthetic construct
  source 1..22: mol_type = other RNA
gagctactgcactactgggcag

SEQ ID NO: 10052 - RNA, 22 nt, synthetic construct
  source 1..22: mol_type = other RNA
gagctcagatacgttgacatat

SEQ ID NO: 10053 - RNA, 22 nt, synthetic construct
  source 1..22: mol_type = other RNA
gagctctctctggtcaattttg

SEQ ID NO: 10054 - RNA, 22 nt, synthetic construct
  source 1..22: mol_type = other RNA
gagcttatataagccgaaaaac

SEQ ID NO: 10055 - RNA, 22 nt, synthetic construct
  source 1..22: mol_type = other RNA
gaggaactctaagtatccccag

SEQ ID NO: 10056 - RNA, 22 nt, synthetic construct
  source 1..22: mol_type = other RNA
gaggaatatgacggaagaacat

SEQ ID NO: 10057 - RNA, 22 nt, synthetic construct
  source 1..22: mol_type = other RNA
gaggaatctcagacgtttttcg

SEQ ID NO: 10058 - RNA, 22 nt, synthetic construct
  source 1..22: mol_type = other RNA
gaggagctacagacattttgaa

SEQ ID NO: 10059 - RNA, 22 nt, synthetic construct
  source 1..22: mol_type = other RNA
gaggatttaagggatggaaaag

SEQ ID NO: 10060 - RNA, 22 nt, synthetic construct
  source 1..22: mol_type = other RNA
gaggcatggaccttgagttgga

SEQ ID NO: 10061 - RNA, 22 nt, synthetic construct
  source 1..22: mol_type = other RNA
gaggccaatgccccactggcag

SEQ ID NO: 10062 - RNA, 22 nt, synthetic construct
  source 1..22: mol_type = other RNA
gaggctgaaagaggccaatgcc

SEQ ID NO: 10063 - RNA, 22 nt, synthetic construct
  source 1..22: mol_type = other RNA
gaggcttgcataataagctaaa

SEQ ID NO: 10064 - RNA, 22 nt, synthetic construct
  source 1..22: mol_type = other RNA
gagggagaagcatgaaaaagca

SEQ ID NO: 10065 - RNA, 22 nt, synthetic construct
  source 1..22: mol_type = other RNA
gaggggaagatgatgagctact

SEQ ID NO: 10066 - RNA, 22 nt, synthetic construct
  source 1..22: mol_type = other RNA
gagggtcttcttacatgcattt

SEQ ID NO: 10067 - RNA, 22 nt, synthetic construct
  source 1..22: mol_type = other RNA
gaggtagcaaggcccaccttga

SEQ ID NO: 10068 - RNA, 22 nt, synthetic construct
  source 1..22: mol_type = other RNA
gaggtcaagtaagaagacatga

SEQ ID NO: 10069 - RNA, 22 nt, synthetic construct
  source 1..22: mol_type = other RNA
gaggtgagttaaaaggtgtcct

SEQ ID NO: 10070 - RNA, 22 nt, synthetic construct
  source 1..22: mol_type = other RNA
gagtatttaggcagattgaaaa

SEQ ID NO: 10071 - RNA, 22 nt, synthetic construct
  source 1..22: mol_type = other RNA
gagtccccaaaacatctctctt

SEQ ID NO: 10072 - RNA, 22 nt, synthetic construct
  source 1..22: mol_type = other RNA
gagtgaagtataagaagggtgg

SEQ ID NO: 10073 - RNA, 22 nt, synthetic construct
  source 1..22: mol_type = other RNA
gagtgtagaacacctggtagct

SEQ ID NO: 10074 - RNA, 22 nt, synthetic construct
  source 1..22: mol_type = other RNA
gagttaaaaggtgtccttttca

SEQ ID NO: 10075 - RNA, 22 nt, synthetic construct
  source 1..22: mol_type = other RNA
gagttcctcatgtagaccttgt

SEQ ID NO: 10076 - RNA, 22 nt, synthetic construct
  source 1..22: mol_type = other RNA
gagttctatgttcttccgtcat

SEQ ID NO: 10077 - RNA, 22 nt, synthetic construct
  source 1..22: mol_type = other RNA
gagttgaggagctacagacatt

SEQ ID NO: 10078 - RNA, 22 nt, synthetic construct
  source 1..22: mol_type = other RNA
gagttgattgtcaggaagcatt

SEQ ID NO: 10079 - RNA, 22 nt, synthetic construct
  source 1..22: mol_type = other RNA
gagttggacttgcctgaaataa

SEQ ID NO: 10080 - RNA, 22 nt, synthetic construct
  source 1..22: mol_type = other RNA
gataagcaagagagatgttttg

SEQ ID NO: 10081 - RNA, 22 nt, synthetic construct
  source 1..22: mol_type = other RNA
gatacatggttgtgacctgagg

SEQ ID NO: 10082 - RNA, 22 nt, synthetic construct
  source 1..22: mol_type = other RNA
gatacgttgacatataaatgat

SEQ ID NO: 10083 - RNA, 22 nt, synthetic construct
  source 1..22: mol_type = other RNA
gatacttagagttcctcatgta

SEQ ID NO: 10084 - RNA, 22 nt, synthetic construct
  source 1..22: mol_type = other RNA
gatatgcatttagaagtgaaga

SEQ ID NO: 10085 - RNA, 22 nt, synthetic construct
  source 1..22: mol_type = other RNA
gatattgtgaagtacatattag

SEQ ID NO: 10086 - RNA, 22 nt, synthetic construct
  source 1..22: mol_type = other RNA
gatcaatgaaactgggctgtac

SEQ ID NO: 10087 - RNA, 22 nt, synthetic construct
  source 1..22: mol_type = other RNA
gatcacaaggccacccttctta

SEQ ID NO: 10088 - RNA, 22 nt, synthetic construct
  source 1..22: mol_type = other RNA
gatcagcactggtaagattgaa

SEQ ID NO: 10089 - RNA, 22 nt, synthetic construct
  source 1..22: mol_type = other RNA
gatcatttatatgtcaacgtat

SEQ ID NO: 10090 - RNA, 22 nt, synthetic construct
  source 1..22: mol_type = other RNA
gatcctggggatacttagagtt

SEQ ID NO: 10091 - RNA, 22 nt, synthetic construct
  source 1..22: mol_type = other RNA
gatctggtgatgatggagggga

SEQ ID NO: 10092 - RNA, 22 nt, synthetic construct
  source 1..22: mol_type = other RNA
gatgagctactgcactactggg

SEQ ID NO: 10093 - RNA, 22 nt, synthetic construct
  source 1..22: mol_type = other RNA
gatgagtgtagaacacctggta

SEQ ID NO: 10094 - RNA, 22 nt, synthetic construct
  source 1..22: mol_type = other RNA
gatgatgagctactgcactact

SEQ ID NO: 10095 - RNA, 22 nt, synthetic construct
  source 1..22: mol_type = other RNA
gatgatggaggggaagatgatg

SEQ ID NO: 10096 - RNA, 22 nt, synthetic construct
  source 1..22: mol_type = other RNA
gatgctgccagtggggcattgg

SEQ ID NO: 10097 - RNA, 22 nt, synthetic construct
  source 1..22: mol_type = other RNA
gatggaaaaggaagactagagg

SEQ ID NO: 10098 - RNA, 22 nt, synthetic construct
  source 1..22: mol_type = other RNA
gatggaggggaagatgatgagc

SEQ ID NO: 10099 - RNA, 22 nt, synthetic construct
  source 1..22: mol_type = other RNA
gatggctcaggatatgcattta

SEQ ID NO: 10100 - RNA, 22 nt, synthetic construct
  source 1..22: mol_type = other RNA
gatgtgcatttttgtgaaatga

SEQ ID NO: 10101 - RNA, 22 nt, synthetic construct
  source 1..22: mol_type = other RNA
gatgtgggcccgcagcagctac

SEQ ID NO: 10102 - RNA, 22 nt, synthetic construct
  source 1..22: mol_type = other RNA
gatgttttggggactcatttca

SEQ ID NO: 10103 - RNA, 22 nt, synthetic construct
  source 1..22: mol_type = other RNA
gattcctcaaaattgaccagag

SEQ ID NO: 10104 - RNA, 22 nt, synthetic construct
  source 1..22: mol_type = other RNA
gattctttccattatgattctt

SEQ ID NO: 10105 - RNA, 22 nt, synthetic construct
  source 1..22: mol_type = other RNA
gattctttgttacaggcaccga

SEQ ID NO: 10106 - RNA, 22 nt, synthetic construct
  source 1..22: mol_type = other RNA
gattgaaaaggacaccttttaa

SEQ ID NO: 10107 - RNA, 22 nt, synthetic construct
  source 1..22: mol_type = other RNA
gattgaacactgcccccaggta

SEQ ID NO: 10108 - RNA, 22 nt, synthetic construct
  source 1..22: mol_type = other RNA
gattgaccccggaagtatactt

SEQ ID NO: 10109 - RNA, 22 nt, synthetic construct
  source 1..22: mol_type = other RNA
gattgtcagctactaatgatgt

SEQ ID NO: 10110 - RNA, 22 nt, synthetic construct
  source 1..22: mol_type = other RNA
gattgtcaggaagcattcaaaa

SEQ ID NO: 10111 - RNA, 22 nt, synthetic construct
  source 1..22: mol_type = other RNA
gatttaagggatggaaaaggaa

SEQ ID NO: 10112 - RNA, 22 nt, synthetic construct
  source 1..22: mol_type = other RNA
gatttatttcaggcaagtccaa

SEQ ID NO: 10113 - RNA, 22 nt, synthetic construct
  source 1..22: mol_type = other RNA
gattttgaatgcttcctgacaa

SEQ ID NO: 10114 - RNA, 22 nt, synthetic construct
  source 1..22: mol_type = other RNA
gatttttaagcactattagagt

SEQ ID NO: 10115 - RNA, 22 nt, synthetic construct
  source 1..22: mol_type = other RNA
gcaacaacctgcccctgagcca

SEQ ID NO: 10116 - RNA, 22 nt, synthetic construct
  source 1..22: mol_type = other RNA
gcaacccatattttcctaatat

SEQ ID NO: 10117 - RNA, 22 nt, synthetic construct
  source 1..22: mol_type = other RNA
gcaagagagatgttttggggac

SEQ ID NO: 10118 - RNA, 22 nt, synthetic construct
  source 1..22: mol_type = other RNA
gcaagattgaccccggaagtat

SEQ ID NO: 10119 - RNA, 22 nt, synthetic construct
  source 1..22: mol_type = other RNA
gcaagcctctagtcttcctttt

SEQ ID NO: 10120 - RNA, 22 nt, synthetic construct
  source 1..22: mol_type = other RNA
gcaaggcccaccttgagaggtg

SEQ ID NO: 10121 - RNA, 22 nt, synthetic construct
  source 1..22: mol_type = other RNA
gcaagtccaactcaaggtccat

SEQ ID NO: 10122 - RNA, 22 nt, synthetic construct
  source 1..22: mol_type = other RNA
gcaattgtaggggtgtgtgtgt

SEQ ID NO: 10123 - RNA, 22 nt, synthetic construct
  source 1..22: mol_type = other RNA
gcaccgagaatgttgtattcag

SEQ ID NO: 10124 - RNA, 22 nt, synthetic construct
  source 1..22: mol_type = other RNA
gcactaagatgagtgtagaaca

SEQ ID NO: 10125 - RNA, 22 nt, synthetic construct
  source 1..22: mol_type = other RNA
gcactactgggcagatgtgggc

SEQ ID NO: 10126 - RNA, 22 nt, synthetic construct
  source 1..22: mol_type = other RNA
gcactattagagttgattgtca

SEQ ID NO: 10127 - RNA, 22 nt, synthetic construct
  source 1..22: mol_type = other RNA
gcactggaaatacacatgctgt

SEQ ID NO: 10128 - RNA, 22 nt, synthetic construct
  source 1..22: mol_type = other RNA
gcactggtaagattgaacactg

SEQ ID NO: 10129 - RNA, 22 nt, synthetic construct
  source 1..22: mol_type = other RNA
gcactttgggattctttccatt

SEQ ID NO: 10130 - RNA, 22 nt, synthetic construct
  source 1..22: mol_type = other RNA
gcagatgtgggcccgcagcagc

SEQ ID NO: 10131 - RNA, 22 nt, synthetic construct
  source 1..22: mol_type = other RNA
gcagattgaaaaggacaccttt

SEQ ID NO: 10132 - RNA, 22 nt, synthetic construct
  source 1..22: mol_type = other RNA
gcagcagctacctgggggcagt

SEQ ID NO: 10133 - RNA, 22 nt, synthetic construct
  source 1..22: mol_type = other RNA
gcagcatcttcacttctaaatg

SEQ ID NO: 10134 - RNA, 22 nt, synthetic construct
  source 1..22: mol_type = other RNA
gcagcccagagttctatgttct

SEQ ID NO: 10135 - RNA, 22 nt, synthetic construct
  source 1..22: mol_type = other RNA
gcagctaccaggtgttctacac

SEQ ID NO: 10136 - RNA, 22 nt, synthetic construct
  source 1..22: mol_type = other RNA
gcagctacctgggggcagtgtt

SEQ ID NO: 10137 - RNA, 22 nt, synthetic construct
  source 1..22: mol_type = other RNA
gcaggacaattccataggtgtc

SEQ ID NO: 10138 - RNA, 22 nt, synthetic construct
  source 1..22: mol_type = other RNA
gcaggttgttgcaagattgacc

SEQ ID NO: 10139 - RNA, 22 nt, synthetic construct
  source 1..22: mol_type = other RNA
gcagtagctcatcatcttcccc

SEQ ID NO: 10140 - RNA, 22 nt, synthetic construct
  source 1..22: mol_type = other RNA
gcagtgttcaatcttaccagtg

SEQ ID NO: 10141 - RNA, 22 nt, synthetic construct
  source 1..22: mol_type = other RNA
gcataataagctaaagaggctg

SEQ ID NO: 10142 - RNA, 22 nt, synthetic construct
  source 1..22: mol_type = other RNA
gcatatcctgagccatcggtga

SEQ ID NO: 10143 - RNA, 22 nt, synthetic construct
  source 1..22: mol_type = other RNA
gcatcttcacttctaaatgcat

SEQ ID NO: 10144 - RNA, 22 nt, synthetic construct
  source 1..22: mol_type = other RNA
gcatgaaaaagcagctaccagg

SEQ ID NO: 10145 - RNA, 22 nt, synthetic construct
  source 1..22: mol_type = other RNA
gcatgactattccttgttgaaa

SEQ ID NO: 10146 - RNA, 22 nt, synthetic construct
  source 1..22: mol_type = other RNA
gcatggaccttgagttggactt

SEQ ID NO: 10147 - RNA, 22 nt, synthetic construct
  source 1..22: mol_type = other RNA
gcatgtaagaagaccctcactg

SEQ ID NO: 10148 - RNA, 22 nt, synthetic construct
  source 1..22: mol_type = other RNA
gcatgtgtatttccagtgcaat

SEQ ID NO: 10149 - RNA, 22 nt, synthetic construct
  source 1..22: mol_type = other RNA
gcattcaaaatcttgaccaaat

SEQ ID NO: 10150 - RNA, 22 nt, synthetic construct
  source 1..22: mol_type = other RNA
gcattggcctctttcagcctct

SEQ ID NO: 10151 - RNA, 22 nt, synthetic construct
  source 1..22: mol_type = other RNA
gcatttagaagtgaagatgctg

SEQ ID NO: 10152 - RNA, 22 nt, synthetic construct
  source 1..22: mol_type = other RNA
gcatttgaggtcaagtaagaag

SEQ ID NO: 10153 - RNA, 22 nt, synthetic construct
  source 1..22: mol_type = other RNA
gcatttggtcaagattttgaat

SEQ ID NO: 10154 - RNA, 22 nt, synthetic construct
  source 1..22: mol_type = other RNA
gcatttttgtgaaatgaaaaca

SEQ ID NO: 10155 - RNA, 22 nt, synthetic construct
  source 1..22: mol_type = other RNA
gccaatgccccactggcagcat

SEQ ID NO: 10156 - RNA, 22 nt, synthetic construct
  source 1..22: mol_type = other RNA
gccacaaggtctacatgaggaa

SEQ ID NO: 10157 - RNA, 22 nt, synthetic construct
  source 1..22: mol_type = other RNA
gccacccttcttatacttcact

SEQ ID NO: 10158 - RNA, 22 nt, synthetic construct
  source 1..22: mol_type = other RNA
gccagacaaatggaggaatatg

SEQ ID NO: 10159 - RNA, 22 nt, synthetic construct
  source 1..22: mol_type = other RNA
gccagtggggcattggcctctt

SEQ ID NO: 10160 - RNA, 22 nt, synthetic construct
  source 1..22: mol_type = other RNA
gccatcggtgaaactaacagat

SEQ ID NO: 10161 - RNA, 22 nt, synthetic construct
  source 1..22: mol_type = other RNA
gccatgtgaagagggagaagca

SEQ ID NO: 10162 - RNA, 22 nt, synthetic construct
  source 1..22: mol_type = other RNA
gcccacatctgcccagtagtgc

SEQ ID NO: 10163 - RNA, 22 nt, synthetic construct
  source 1..22: mol_type = other RNA
gcccaccttgagaggtgagtta

SEQ ID NO: 10164 - RNA, 22 nt, synthetic construct
  source 1..22: mol_type = other RNA
gcccagagttctatgttcttcc

SEQ ID NO: 10165 - RNA, 22 nt, synthetic construct
  source 1..22: mol_type = other RNA
gcccagtagtgcagtagctcat

SEQ ID NO: 10166 - RNA, 22 nt, synthetic construct
  source 1..22: mol_type = other RNA
gcccagtttcattgatcacaag

SEQ ID NO: 10167 - RNA, 22 nt, synthetic construct
  source 1..22: mol_type = other RNA
gccccactggcagcatcttcac

SEQ ID NO: 10168 - RNA, 22 nt, synthetic construct
  source 1..22: mol_type = other RNA
gcccccaggtagctgctgcggg

SEQ ID NO: 10169 - RNA, 22 nt, synthetic construct
  source 1..22: mol_type = other RNA
gcccctgagccacaaggtctac

SEQ ID NO: 10170 - RNA, 22 nt, synthetic construct
  source 1..22: mol_type = other RNA
gcccgcagcagctacctggggg

SEQ ID NO: 10171 - RNA, 22 nt, synthetic construct
  source 1..22: mol_type = other RNA
gccgaaaaacgtctgagattcc

SEQ ID NO: 10172 - RNA, 22 nt, synthetic construct
  source 1..22: mol_type = other RNA
gcctaaatactctcaggcacta

SEQ ID NO: 10173 - RNA, 22 nt, synthetic construct
  source 1..22: mol_type = other RNA
gcctctagtcttccttttccat

SEQ ID NO: 10174 - RNA, 22 nt, synthetic construct
  source 1..22: mol_type = other RNA
gcctctggaatgggaagacacc

SEQ ID NO: 10175 - RNA, 22 nt, synthetic construct
  source 1..22: mol_type = other RNA
gcctctttagcttattatgcaa

SEQ ID NO: 10176 - RNA, 22 nt, synthetic construct
  source 1..22: mol_type = other RNA
gcctctttcagcctctttagct

SEQ ID NO: 10177 - RNA, 22 nt, synthetic construct
  source 1..22: mol_type = other RNA
gcctgaaataaatccaaaagga

SEQ ID NO: 10178 - RNA, 22 nt, synthetic construct
  source 1..22: mol_type = other RNA
gcctgagagtatttaggcagat

SEQ ID NO: 10179 - RNA, 22 nt, synthetic construct
  source 1..22: mol_type = other RNA
gcctgtaacaaagaatcataat

SEQ ID NO: 10180 - RNA, 22 nt, synthetic construct
  source 1..22: mol_type = other RNA
gccttgctacctcaagggggac

SEQ ID NO: 10181 - RNA, 22 nt, synthetic construct
  source 1..22: mol_type = other RNA
gccttgtgatcaatgaaactgg

SEQ ID NO: 10182 - RNA, 22 nt, synthetic construct
  source 1..22: mol_type = other RNA
gcgggcccacatctgcccagta

SEQ ID NO: 10183 - RNA, 22 nt, synthetic construct
  source 1..22: mol_type = other RNA
gctaaagaggctgaaagaggcc

SEQ ID NO: 10184 - RNA, 22 nt, synthetic construct
  source 1..22: mol_type = other RNA
gctacagacattttgaaccctg

SEQ ID NO: 10185 - RNA, 22 nt, synthetic construct
  source 1..22: mol_type = other RNA
gctaccaggtgttctacactca

SEQ ID NO: 10186 - RNA, 22 nt, synthetic construct
  source 1..22: mol_type = other RNA
gctacctcaagggggactgtct

SEQ ID NO: 10187 - RNA, 22 nt, synthetic construct
  source 1..22: mol_type = other RNA
gctacctgggggcagtgttcaa

SEQ ID NO: 10188 - RNA, 22 nt, synthetic construct
  source 1..22: mol_type = other RNA
gctactaatgatgttttcctat

SEQ ID NO: 10189 - RNA, 22 nt, synthetic construct
  source 1..22: mol_type = other RNA
gctactgcactactgggcagat

SEQ ID NO: 10190 - RNA, 22 nt, synthetic construct
  source 1..22: mol_type = other RNA
gctcagatacgttgacatataa

SEQ ID NO: 10191 - RNA, 22 nt, synthetic construct
  source 1..22: mol_type = other RNA
gctcaggatatgcatttagaag

SEQ ID NO: 10192 - RNA, 22 nt, synthetic construct
  source 1..22: mol_type = other RNA
gctcaggggcaggttgttgcaa

SEQ ID NO: 10193 - RNA, 22 nt, synthetic construct
  source 1..22: mol_type = other RNA
gctcataaacattaggtgagtt

SEQ ID NO: 10194 - RNA, 22 nt, synthetic construct
  source 1..22: mol_type = other RNA
gctcatcatcttcccctccatc

SEQ ID NO: 10195 - RNA, 22 nt, synthetic construct
  source 1..22: mol_type = other RNA
gctcctcaactcacctaatgtt

SEQ ID NO: 10196 - RNA, 22 nt, synthetic construct
  source 1..22: mol_type = other RNA
gctccttttggatttatttcag

SEQ ID NO: 10197 - RNA, 22 nt, synthetic construct
  source 1..22: mol_type = other RNA
gctctaagagaagcactttggg

SEQ ID NO: 10198 - RNA, 22 nt, synthetic construct
  source 1..22: mol_type = other RNA
gctctctctggtcaattttgag

SEQ ID NO: 10199 - RNA, 22 nt, synthetic construct
  source 1..22: mol_type = other RNA
gctgaaagaggccaatgcccca

SEQ ID NO: 10200 - RNA, 22 nt, synthetic construct
  source 1..22: mol_type = other RNA
gctgacaatcaatgatttttaa

SEQ ID NO: 10201 - RNA, 22 nt, synthetic construct
  source 1..22: mol_type = other RNA
gctgatcatttatatgtcaacg

SEQ ID NO: 10202 - RNA, 22 nt, synthetic construct
  source 1..22: mol_type = other RNA
gctgccagtggggcattggcct

SEQ ID NO: 10203 - RNA, 22 nt, synthetic construct
  source 1..22: mol_type = other RNA
gctgccatgtgaagagggagaa

SEQ ID NO: 10204 - RNA, 22 nt, synthetic construct
  source 1..22: mol_type = other RNA
gctgcgggcccacatctgccca

SEQ ID NO: 10205 - RNA, 22 nt, synthetic construct
  source 1..22: mol_type = other RNA
gctgctgcgggcccacatctgc

SEQ ID NO: 10206 - RNA, 22 nt, synthetic construct
  source 1..22: mol_type = other RNA
gctgctttttcatgcttctccc

SEQ ID NO: 10207 - RNA, 22 nt, synthetic construct
  source 1..22: mol_type = other RNA
gctgtactttgtatattccaaa

SEQ ID NO: 10208 - RNA, 22 nt, synthetic construct
  source 1..22: mol_type = other RNA
gctgtgttaggaatgaaatgag

SEQ ID NO: 10209 - RNA, 22 nt, synthetic construct
  source 1..22: mol_type = other RNA
gcttaaaaatcattgattgtca

SEQ ID NO: 10210 - RNA, 22 nt, synthetic construct
  source 1..22: mol_type = other RNA
gcttatataagccgaaaaacgt

SEQ ID NO: 10211 - RNA, 22 nt, synthetic construct
  source 1..22: mol_type = other RNA
gcttatataagctctaagagaa

SEQ ID NO: 10212 - RNA, 22 nt, synthetic construct
  source 1..22: mol_type = other RNA
gcttatctgttagtttcaccga

SEQ ID NO: 10213 - RNA, 22 nt, synthetic construct
  source 1..22: mol_type = other RNA
gcttattatgcaagcctctagt

SEQ ID NO: 10214 - RNA, 22 nt, synthetic construct
  source 1..22: mol_type = other RNA
gcttcctgacaatcaactctaa

SEQ ID NO: 10215 - RNA, 22 nt, synthetic construct
  source 1..22: mol_type = other RNA
gcttctccctcttcacatggca

SEQ ID NO: 10216 - RNA, 22 nt, synthetic construct
  source 1..22: mol_type = other RNA
gcttctcttagagcttatataa

SEQ ID NO: 10217 - RNA, 22 nt, synthetic construct
  source 1..22: mol_type = other RNA
gcttgcataataagctaaagag

SEQ ID NO: 10218 - RNA, 22 nt, synthetic construct
  source 1..22: mol_type = other RNA
gctttctggagtgaagtataag

SEQ ID NO: 10219 - RNA, 22 nt, synthetic construct
  source 1..22: mol_type = other RNA
gctttttcatgcttctccctct

SEQ ID NO: 10220 - RNA, 22 nt, synthetic construct
  source 1..22: mol_type = other RNA
ggaaaacatcattagtagctga

SEQ ID NO: 10221 - RNA, 22 nt, synthetic construct
  source 1..22: mol_type = other RNA
ggaaaaggaagactagaggctt

SEQ ID NO: 10222 - RNA, 22 nt, synthetic construct
  source 1..22: mol_type = other RNA
ggaaaatatgggttgcatttgg

SEQ ID NO: 10223 - RNA, 22 nt, synthetic construct
  source 1..22: mol_type = other RNA
ggaaagaatcccaaagtgcttc

SEQ ID NO: 10224 - RNA, 22 nt, synthetic construct
  source 1..22: mol_type = other RNA
ggaaatacacatgctgtgttag

SEQ ID NO: 10225 - RNA, 22 nt, synthetic construct
  source 1..22: mol_type = other RNA
ggaactctaagtatccccagga

SEQ ID NO: 10226 - RNA, 22 nt, synthetic construct
  source 1..22: mol_type = other RNA
ggaagaacatagaactctgggc

SEQ ID NO: 10227 - RNA, 22 nt, synthetic construct
  source 1..22: mol_type = other RNA
ggaagacacctatggaattgtc

SEQ ID NO: 10228 - RNA, 22 nt, synthetic construct
  source 1..22: mol_type = other RNA
ggaagactagaggcttgcataa

SEQ ID NO: 10229 - RNA, 22 nt, synthetic construct
  source 1..22: mol_type = other RNA
ggaagatgatgagctactgcac

SEQ ID NO: 10230 - RNA, 22 nt, synthetic construct
  source 1..22: mol_type = other RNA
ggaagcattcaaaatcttgacc

SEQ ID NO: 10231 - RNA, 22 nt, synthetic construct
  source 1..22: mol_type = other RNA
ggaagtatactttggaatatac

SEQ ID NO: 10232 - RNA, 22 nt, synthetic construct
  source 1..22: mol_type = other RNA
ggaatatacaaagtacagccca

SEQ ID NO: 10233 - RNA, 22 nt, synthetic construct
  source 1..22: mol_type = other RNA
ggaatatgacggaagaacatag

SEQ ID NO: 10234 - RNA, 22 nt, synthetic construct
  source 1..22: mol_type = other RNA
ggaatctcagacgtttttcggc

SEQ ID NO: 10235 - RNA, 22 nt, synthetic construct
  source 1..22: mol_type = other RNA
ggaatgaaatgagtccccaaaa

SEQ ID NO: 10236 - RNA, 22 nt, synthetic construct
  source 1..22: mol_type = other RNA
ggaatgggaagacacctatgga

SEQ ID NO: 10237 - RNA, 22 nt, synthetic construct
  source 1..22: mol_type = other RNA
ggaattgtcctgctttctggag

SEQ ID NO: 10238 - RNA, 22 nt, synthetic construct
  source 1..22: mol_type = other RNA
ggacaattccataggtgtcttc

SEQ ID NO: 10239 - RNA, 22 nt, synthetic construct
  source 1..22: mol_type = other RNA
ggacaccttttaactcacctct

SEQ ID NO: 10240 - RNA, 22 nt, synthetic construct
  source 1..22: mol_type = other RNA
ggaccttgagaccacagggttc

SEQ ID NO: 10241 - RNA, 22 nt, synthetic construct
  source 1..22: mol_type = other RNA
ggaccttgagttggacttgcct

SEQ ID NO: 10242 - RNA, 22 nt, synthetic construct
  source 1..22: mol_type = other RNA
ggactcatttcattcctaacac

SEQ ID NO: 10243 - RNA, 22 nt, synthetic construct
  source 1..22: mol_type = other RNA
ggactgtctttcagatacatgg

SEQ ID NO: 10244 - RNA, 22 nt, synthetic construct
  source 1..22: mol_type = other RNA
ggacttgcctgaaataaatcca

SEQ ID NO: 10245 - RNA, 22 nt, synthetic construct
  source 1..22: mol_type = other RNA
ggagaagcatgaaaaagcagct

SEQ ID NO: 10246 - RNA, 22 nt, synthetic construct
  source 1..22: mol_type = other RNA
ggagctacagacattttgaacc

SEQ ID NO: 10247 - RNA, 22 nt, synthetic construct
  source 1..22: mol_type = other RNA
ggaggaatatgacggaagaaca

SEQ ID NO: 10248 - RNA, 22 nt, synthetic construct
  source 1..22: mol_type = other RNA
ggaggggaagatgatgagctac

SEQ ID NO: 10249 - RNA, 22 nt, synthetic construct
  source 1..22: mol_type = other RNA
ggagtgaagtataagaagggtg

SEQ ID NO: 10250 - RNA, 22 nt, synthetic construct
  source 1..22: mol_type = other RNA
ggatacttagagttcctcatgt

SEQ ID NO: 10251 - RNA, 22 nt, synthetic construct
  source 1..22: mol_type = other RNA
ggatatgcatttagaagtgaag

SEQ ID NO: 10252 - RNA, 22 nt, synthetic construct
  source 1..22: mol_type = other RNA
ggatctggtgatgatggagggg

SEQ ID NO: 10253 - RNA, 22 nt, synthetic construct
  source 1..22: mol_type = other RNA
ggatggaaaaggaagactagag

SEQ ID NO: 10254 - RNA, 22 nt, synthetic construct
  source 1..22: mol_type = other RNA
ggattctttccattatgattct

SEQ ID NO: 10255 - RNA, 22 nt, synthetic construct
  source 1..22: mol_type = other RNA
ggatttaagggatggaaaagga

SEQ ID NO: 10256 - RNA, 22 nt, synthetic construct
  source 1..22: mol_type = other RNA
ggatttatttcaggcaagtcca

SEQ ID NO: 10257 - RNA, 22 nt, synthetic construct
  source 1..22: mol_type = other RNA
ggcaagtccaactcaaggtcca

SEQ ID NO: 10258 - RNA, 22 nt, synthetic construct
  source 1..22: mol_type = other RNA
ggcaccgagaatgttgtattca

SEQ ID NO: 10259 - RNA, 22 nt, synthetic construct
  source 1..22: mol_type = other RNA
ggcactaagatgagtgtagaac

SEQ ID NO: 10260 - RNA, 22 nt, synthetic construct
  source 1..22: mol_type = other RNA
ggcagatgtgggcccgcagcag

SEQ ID NO: 10261 - RNA, 22 nt, synthetic construct
  source 1..22: mol_type = other RNA
ggcagattgaaaaggacacctt

SEQ ID NO: 10262 - RNA, 22 nt, synthetic construct
  source 1..22: mol_type = other RNA
ggcagcatcttcacttctaaat

SEQ ID NO: 10263 - RNA, 22 nt, synthetic construct
  source 1..22: mol_type = other RNA
ggcagcccagagttctatgttc

SEQ ID NO: 10264 - RNA, 22 nt, synthetic construct
  source 1..22: mol_type = other RNA
ggcaggttgttgcaagattgac

SEQ ID NO: 10265 - RNA, 22 nt, synthetic construct
  source 1..22: mol_type = other RNA
ggcagtgttcaatcttaccagt

SEQ ID NO: 10266 - RNA, 22 nt, synthetic construct
  source 1..22: mol_type = other RNA
ggcatggaccttgagttggact

SEQ ID NO: 10267 - RNA, 22 nt, synthetic construct
  source 1..22: mol_type = other RNA
ggcattggcctctttcagcctc

SEQ ID NO: 10268 - RNA, 22 nt, synthetic construct
  source 1..22: mol_type = other RNA
ggccaatgccccactggcagca

SEQ ID NO: 10269 - RNA, 22 nt, synthetic construct
  source 1..22: mol_type = other RNA
ggccacccttcttatacttcac

SEQ ID NO: 10270 - RNA, 22 nt, synthetic construct
  source 1..22: mol_type = other RNA
ggcccacatctgcccagtagtg

SEQ ID NO: 10271 - RNA, 22 nt, synthetic construct
  source 1..22: mol_type = other RNA
ggcccaccttgagaggtgagtt

SEQ ID NO: 10272 - RNA, 22 nt, synthetic construct
  source 1..22: mol_type = other RNA
ggcccgcagcagctacctgggg

SEQ ID NO: 10273 - RNA, 22 nt, synthetic construct
  source 1..22: mol_type = other RNA
ggcctctttcagcctctttagc

SEQ ID NO: 10274 - RNA, 22 nt, synthetic construct
  source 1..22: mol_type = other RNA
ggccttgctacctcaaggggga

SEQ ID NO: 10275 - RNA, 22 nt, synthetic construct
  source 1..22: mol_type = other RNA
ggccttgtgatcaatgaaactg

SEQ ID NO: 10276 - RNA, 22 nt, synthetic construct
  source 1..22: mol_type = other RNA
ggctcaggatatgcatttagaa

SEQ ID NO: 10277 - RNA, 22 nt, synthetic construct
  source 1..22: mol_type = other RNA
ggctcaggggcaggttgttgca

SEQ ID NO: 10278 - RNA, 22 nt, synthetic construct
  source 1..22: mol_type = other RNA
ggctcataaacattaggtgagt

SEQ ID NO: 10279 - RNA, 22 nt, synthetic construct
  source 1..22: mol_type = other RNA
ggctgaaagaggccaatgcccc

SEQ ID NO: 10280 - RNA, 22 nt, synthetic construct
  source 1..22: mol_type = other RNA
ggctgccatgtgaagagggaga

SEQ ID NO: 10281 - RNA, 22 nt, synthetic construct
  source 1..22: mol_type = other RNA
ggctgtactttgtatattccaa

SEQ ID NO: 10282 - RNA, 22 nt, synthetic construct
  source 1..22: mol_type = other RNA
ggcttatataagctctaagaga

SEQ ID NO: 10283 - RNA, 22 nt, synthetic construct
  source 1..22: mol_type = other RNA
ggcttgcataataagctaaaga

SEQ ID NO: 10284 - RNA, 22 nt, synthetic construct
  source 1..22: mol_type = other RNA
gggaagacacctatggaattgt

SEQ ID NO: 10285 - RNA, 22 nt, synthetic construct
  source 1..22: mol_type = other RNA
gggaagatgatgagctactgca

SEQ ID NO: 10286 - RNA, 22 nt, synthetic construct
  source 1..22: mol_type = other RNA
gggactcatttcattcctaaca

SEQ ID NO: 10287 - RNA, 22 nt, synthetic construct
  source 1..22: mol_type = other RNA
gggactgtctttcagatacatg

SEQ ID NO: 10288 - RNA, 22 nt, synthetic construct
  source 1..22: mol_type = other RNA
gggagaagcatgaaaaagcagc

SEQ ID NO: 10289 - RNA, 22 nt, synthetic construct
  source 1..22: mol_type = other RNA
gggatacttagagttcctcatg

SEQ ID NO: 10290 - RNA, 22 nt, synthetic construct
  source 1..22: mol_type = other RNA
gggatggaaaaggaagactaga

SEQ ID NO: 10291 - RNA, 22 nt, synthetic construct
  source 1..22: mol_type = other RNA
gggattctttccattatgattc

SEQ ID NO: 10292 - RNA, 22 nt, synthetic construct
  source 1..22: mol_type = other RNA
gggcagatgtgggcccgcagca

SEQ ID NO: 10293 - RNA, 22 nt, synthetic construct
  source 1..22: mol_type = other RNA
gggcaggttgttgcaagattga

SEQ ID NO: 10294 - RNA, 22 nt, synthetic construct
  source 1..22: mol_type = other RNA
gggcagtgttcaatcttaccag

SEQ ID NO: 10295 - RNA, 22 nt, synthetic construct
  source 1..22: mol_type = other RNA
gggcattggcctctttcagcct

SEQ ID NO: 10296 - RNA, 22 nt, synthetic construct
  source 1..22: mol_type = other RNA
gggcccacatctgcccagtagt

SEQ ID NO: 10297 - RNA, 22 nt, synthetic construct
  source 1..22: mol_type = other RNA
gggcccgcagcagctacctggg

SEQ ID NO: 10298 - RNA, 22 nt, synthetic construct
  source 1..22: mol_type = other RNA
gggccttgctacctcaaggggg

SEQ ID NO: 10299 - RNA, 22 nt, synthetic construct
  source 1..22: mol_type = other RNA
gggctgccatgtgaagagggag

SEQ ID NO: 10300 - RNA, 22 nt, synthetic construct
  source 1..22: mol_type = other RNA
gggctgtactttgtatattcca

SEQ ID NO: 10301 - RNA, 22 nt, synthetic construct
  source 1..22: mol_type = other RNA
ggggaagatgatgagctactgc

SEQ ID NO: 10302 - RNA, 22 nt, synthetic construct
  source 1..22: mol_type = other RNA
ggggactcatttcattcctaac

SEQ ID NO: 10303 - RNA, 22 nt, synthetic construct
  source 1..22: mol_type = other RNA
ggggactgtctttcagatacat

SEQ ID NO: 10304 - RNA, 22 nt, synthetic construct
  source 1..22: mol_type = other RNA
ggggatacttagagttcctcat

SEQ ID NO: 10305 - RNA, 22 nt, synthetic construct
  source 1..22: mol_type = other RNA
ggggcaggttgttgcaagattg

SEQ ID NO: 10306 - RNA, 22 nt, synthetic construct
  source 1..22: mol_type = other RNA
ggggcagtgttcaatcttacca

SEQ ID NO: 10307 - RNA, 22 nt, synthetic construct
  source 1..22: mol_type = other RNA
ggggcattggcctctttcagcc

SEQ ID NO: 10308 - RNA, 22 nt, synthetic construct
  source 1..22: mol_type = other RNA
gggggactgtctttcagataca

SEQ ID NO: 10309 - RNA, 22 nt, synthetic construct
  source 1..22: mol_type = other RNA
gggggcagtgttcaatcttacc

SEQ ID NO: 10310 - RNA, 22 nt, synthetic construct
  source 1..22: mol_type = other RNA
ggggtcaatcttgcaacaacct

SEQ ID NO: 10311 - RNA, 22 nt, synthetic construct
  source 1..22: mol_type = other RNA
gggtcaatcttgcaacaacctg

SEQ ID NO: 10312 - RNA, 22 nt, synthetic construct
  source 1..22: mol_type = other RNA
gggtcttcttacatgcatttga

SEQ ID NO: 10313 - RNA, 22 nt, synthetic construct
  source 1..22: mol_type = other RNA
gggtggccttgtgatcaatgaa

SEQ ID NO: 10314 - RNA, 22 nt, synthetic construct
  source 1..22: mol_type = other RNA
gggttcaaaatgtctgtagctc

SEQ ID NO: 10315 - RNA, 22 nt, synthetic construct
  source 1..22: mol_type = other RNA
gggttgcatttggtcaagattt

SEQ ID NO: 10316 - RNA, 22 nt, synthetic construct
  source 1..22: mol_type = other RNA
ggtaagattgaacactgccccc

SEQ ID NO: 10317 - RNA, 22 nt, synthetic construct
  source 1..22: mol_type = other RNA
ggtagcaaggcccaccttgaga

SEQ ID NO: 10318 - RNA, 22 nt, synthetic construct
  source 1..22: mol_type = other RNA
ggtagctgctgcgggcccacat

SEQ ID NO: 10319 - RNA, 22 nt, synthetic construct
  source 1..22: mol_type = other RNA
ggtagctgctttttcatgcttc

SEQ ID NO: 10320 - RNA, 22 nt, synthetic construct
  source 1..22: mol_type = other RNA
ggtcaagattttgaatgcttcc

SEQ ID NO: 10321 - RNA, 22 nt, synthetic construct
  source 1..22: mol_type = other RNA
ggtcaagtaagaagacatgaac

SEQ ID NO: 10322 - RNA, 22 nt, synthetic construct
  source 1..22: mol_type = other RNA
ggtcaatcttgcaacaacctgc

SEQ ID NO: 10323 - RNA, 22 nt, synthetic construct
  source 1..22: mol_type = other RNA
ggtcaattttgaggaatctcag

SEQ ID NO: 10324 - RNA, 22 nt, synthetic construct
  source 1..22: mol_type = other RNA
ggtcacaaccatgtatctgaaa

SEQ ID NO: 10325 - RNA, 22 nt, synthetic construct
  source 1..22: mol_type = other RNA
ggtccacttggttcatgtcttc

SEQ ID NO: 10326 - RNA, 22 nt, synthetic construct
  source 1..22: mol_type = other RNA
ggtccatgcctctggaatggga

SEQ ID NO: 10327 - RNA, 22 nt, synthetic construct
  source 1..22: mol_type = other RNA
ggtctacatgaggaactctaag

SEQ ID NO: 10328 - RNA, 22 nt, synthetic construct
  source 1..22: mol_type = other RNA
ggtctcaaggtccacttggttc

SEQ ID NO: 10329 - RNA, 22 nt, synthetic construct
  source 1..22: mol_type = other RNA
ggtcttcttacatgcatttgag

SEQ ID NO: 10330 - RNA, 22 nt, synthetic construct
  source 1..22: mol_type = other RNA
ggtgaaactaacagataagcaa

SEQ ID NO: 10331 - RNA, 22 nt, synthetic construct
  source 1..22: mol_type = other RNA
ggtgagttaaaaggtgtccttt

SEQ ID NO: 10332 - RNA, 22 nt, synthetic construct
  source 1..22: mol_type = other RNA
ggtgagttgaggagctacagac

SEQ ID NO: 10333 - RNA, 22 nt, synthetic construct
  source 1..22: mol_type = other RNA
ggtgatgatggaggggaagatg

SEQ ID NO: 10334 - RNA, 22 nt, synthetic construct
  source 1..22: mol_type = other RNA
ggtgcctgtaacaaagaatcat

SEQ ID NO: 10335 - RNA, 22 nt, synthetic construct
  source 1..22: mol_type = other RNA
ggtggccttgtgatcaatgaaa

SEQ ID NO: 10336 - RNA, 22 nt, synthetic construct
  source 1..22: mol_type = other RNA
ggtgggccttgctacctcaagg

SEQ ID NO: 10337 - RNA, 22 nt, synthetic construct
  source 1..22: mol_type = other RNA
ggtgtccttttcaatctgccta

SEQ ID NO: 10338 - RNA, 22 nt, synthetic construct
  source 1..22: mol_type = other RNA
ggtgtcttcccattccagaggc

SEQ ID NO: 10339 - RNA, 22 nt, synthetic construct
  source 1..22: mol_type = other RNA
ggtgttctacactcatcttagt

SEQ ID NO: 10340 - RNA, 22 nt, synthetic construct
  source 1..22: mol_type = other RNA
ggttcaaaatgtctgtagctcc

SEQ ID NO: 10341 - RNA, 22 nt, synthetic construct
  source 1..22: mol_type = other RNA
ggttcatgtcttcttacttgac

SEQ ID NO: 10342 - RNA, 22 nt, synthetic construct
  source 1..22: mol_type = other RNA
ggttgcatttggtcaagatttt

SEQ ID NO: 10343 - RNA, 22 nt, synthetic construct
  source 1..22: mol_type = other RNA
ggttgtgacctgaggatttaag

SEQ ID NO: 10344 - RNA, 22 nt, synthetic construct
  source 1..22: mol_type = other RNA
ggttgttgcaagattgaccccg

SEQ ID NO: 10345 - RNA, 22 nt, synthetic construct
  source 1..22: mol_type = other RNA
gtaacaaagaatcataatggaa

SEQ ID NO: 10346 - RNA, 22 nt, synthetic construct
  source 1..22: mol_type = other RNA
gtaagaagacatgaaccaagtg

SEQ ID NO: 10347 - RNA, 22 nt, synthetic construct
  source 1..22: mol_type = other RNA
gtaagaagaccctcactgaata

SEQ ID NO: 10348 - RNA, 22 nt, synthetic construct
  source 1..22: mol_type = other RNA
gtaagattgaacactgccccca

SEQ ID NO: 10349 - RNA, 22 nt, synthetic construct
  source 1..22: mol_type = other RNA
gtacagcccagtttcattgatc

SEQ ID NO: 10350 - RNA, 22 nt, synthetic construct
  source 1..22: mol_type = other RNA
gtacatattaggaaaatatggg

SEQ ID NO: 10351 - RNA, 22 nt, synthetic construct
  source 1..22: mol_type = other RNA
gtacttcacaatatctacattc

SEQ ID NO: 10352 - RNA, 22 nt, synthetic construct
  source 1..22: mol_type = other RNA
gtactttgtatattccaaagta

SEQ ID NO: 10353 - RNA, 22 nt, synthetic construct
  source 1..22: mol_type = other RNA
gtagaacacctggtagctgctt

SEQ ID NO: 10354 - RNA, 22 nt, synthetic construct
  source 1..22: mol_type = other RNA
gtagaccttgtggctcaggggc

SEQ ID NO: 10355 - RNA, 22 nt, synthetic construct
  source 1..22: mol_type = other RNA
gtagatattgtgaagtacatat

SEQ ID NO: 10356 - RNA, 22 nt, synthetic construct
  source 1..22: mol_type = other RNA
gtagatgtgcatttttgtgaaa

SEQ ID NO: 10357 - RNA, 22 nt, synthetic construct
  source 1..22: mol_type = other RNA
gtagcaaggcccaccttgagag

SEQ ID NO: 10358 - RNA, 22 nt, synthetic construct
  source 1..22: mol_type = other RNA
gtagctcatcatcttcccctcc

SEQ ID NO: 10359 - RNA, 22 nt, synthetic construct
  source 1..22: mol_type = other RNA
gtagctcctcaactcacctaat

SEQ ID NO: 10360 - RNA, 22 nt, synthetic construct
  source 1..22: mol_type = other RNA
gtagctgacaatcaatgatttt

SEQ ID NO: 10361 - RNA, 22 nt, synthetic construct
  source 1..22: mol_type = other RNA
gtagctgctgcgggcccacatc

SEQ ID NO: 10362 - RNA, 22 nt, synthetic construct
  source 1..22: mol_type = other RNA
gtagctgctttttcatgcttct

SEQ ID NO: 10363 - RNA, 22 nt, synthetic construct
  source 1..22: mol_type = other RNA
gtagtgcagtagctcatcatct

SEQ ID NO: 10364 - RNA, 22 nt, synthetic construct
  source 1..22: mol_type = other RNA
gtataagaagggtggccttgtg

SEQ ID NO: 10365 - RNA, 22 nt, synthetic construct
  source 1..22: mol_type = other RNA
gtatacttccggggtcaatctt

SEQ ID NO: 10366 - RNA, 22 nt, synthetic construct
  source 1..22: mol_type = other RNA
gtatactttggaatatacaaag

SEQ ID NO: 10367 - RNA, 22 nt, synthetic construct
  source 1..22: mol_type = other RNA
gtatattccaaagtatacttcc

SEQ ID NO: 10368 - RNA, 22 nt, synthetic construct
  source 1..22: mol_type = other RNA
gtatccccaggatctggtgatg

SEQ ID NO: 10369 - RNA, 22 nt, synthetic construct
  source 1..22: mol_type = other RNA
gtatctgaaagacagtccccct

SEQ ID NO: 10370 - RNA, 22 nt, synthetic construct
  source 1..22: mol_type = other RNA
gtatctgagctctctctggtca

SEQ ID NO: 10371 - RNA, 22 nt, synthetic construct
  source 1..22: mol_type = other RNA
gtatgactaaagagagaatgta

SEQ ID NO: 10372 - RNA, 22 nt, synthetic construct
  source 1..22: mol_type = other RNA
gtattcagtgagggtcttctta

SEQ ID NO: 10373 - RNA, 22 nt, synthetic construct
  source 1..22: mol_type = other RNA
gtatttaggcagattgaaaagg

SEQ ID NO: 10374 - RNA, 22 nt, synthetic construct
  source 1..22: mol_type = other RNA
gtatttccagtgcaattgtagg

SEQ ID NO: 10375 - RNA, 22 nt, synthetic construct
  source 1..22: mol_type = other RNA
gtcaacgtatctgagctctctc

SEQ ID NO: 10376 - RNA, 22 nt, synthetic construct
  source 1..22: mol_type = other RNA
gtcaagattttgaatgcttcct

SEQ ID NO: 10377 - RNA, 22 nt, synthetic construct
  source 1..22: mol_type = other RNA
gtcaagtaagaagacatgaacc

SEQ ID NO: 10378 - RNA, 22 nt, synthetic construct
  source 1..22: mol_type = other RNA
gtcaatcttgcaacaacctgcc

SEQ ID NO: 10379 - RNA, 22 nt, synthetic construct
  source 1..22: mol_type = other RNA
gtcaattttgaggaatctcaga

SEQ ID NO: 10380 - RNA, 22 nt, synthetic construct
  source 1..22: mol_type = other RNA
gtcacaaccatgtatctgaaag

SEQ ID NO: 10381 - RNA, 22 nt, synthetic construct
  source 1..22: mol_type = other RNA
gtcagctactaatgatgttttc

SEQ ID NO: 10382 - RNA, 22 nt, synthetic construct
  source 1..22: mol_type = other RNA
gtcaggaagcattcaaaatctt

SEQ ID NO: 10383 - RNA, 22 nt, synthetic construct
  source 1..22: mol_type = other RNA
gtcatattcctccatttgtctg

SEQ ID NO: 10384 - RNA, 22 nt, synthetic construct
  source 1..22: mol_type = other RNA
gtccaactcaaggtccatgcct

SEQ ID NO: 10385 - RNA, 22 nt, synthetic construct
  source 1..22: mol_type = other RNA
gtccacttggttcatgtcttct

SEQ ID NO: 10386 - RNA, 22 nt, synthetic construct
  source 1..22: mol_type = other RNA
gtccatgcctctggaatgggaa

SEQ ID NO: 10387 - RNA, 22 nt, synthetic construct
  source 1..22: mol_type = other RNA
gtccccaaaacatctctcttgc

SEQ ID NO: 10388 - RNA, 22 nt, synthetic construct
  source 1..22: mol_type = other RNA
gtcccccttgaggtagcaaggc

SEQ ID NO: 10389 - RNA, 22 nt, synthetic construct
  source 1..22: mol_type = other RNA
gtcctgctttctggagtgaagt

SEQ ID NO: 10390 - RNA, 22 nt, synthetic construct
  source 1..22: mol_type = other RNA
gtccttttcaatctgcctaaat

SEQ ID NO: 10391 - RNA, 22 nt, synthetic construct
  source 1..22: mol_type = other RNA
gtctacatgaggaactctaagt

SEQ ID NO: 10392 - RNA, 22 nt, synthetic construct
  source 1..22: mol_type = other RNA
gtctcaaggtccacttggttca

SEQ ID NO: 10393 - RNA, 22 nt, synthetic construct
  source 1..22: mol_type = other RNA
gtctgagattcctcaaaattga

SEQ ID NO: 10394 - RNA, 22 nt, synthetic construct
  source 1..22: mol_type = other RNA
gtctggctcataaacattaggt

SEQ ID NO: 10395 - RNA, 22 nt, synthetic construct
  source 1..22: mol_type = other RNA
gtctgtagctcctcaactcacc

SEQ ID NO: 10396 - RNA, 22 nt, synthetic construct
  source 1..22: mol_type = other RNA
gtcttcccattccagaggcatg

SEQ ID NO: 10397 - RNA, 22 nt, synthetic construct
  source 1..22: mol_type = other RNA
gtcttccttttccatcccttaa

SEQ ID NO: 10398 - RNA, 22 nt, synthetic construct
  source 1..22: mol_type = other RNA
gtcttcttacatgcatttgagg

SEQ ID NO: 10399 - RNA, 22 nt, synthetic construct
  source 1..22: mol_type = other RNA
gtcttcttacttgacctcaaat

SEQ ID NO: 10400 - RNA, 22 nt, synthetic construct
  source 1..22: mol_type = other RNA
gtctttcagatacatggttgtg

SEQ ID NO: 10401 - RNA, 22 nt, synthetic construct
  source 1..22: mol_type = other RNA
gtgaaactaacagataagcaag

SEQ ID NO: 10402 - RNA, 22 nt, synthetic construct
  source 1..22: mol_type = other RNA
gtgaagagggagaagcatgaaa

SEQ ID NO: 10403 - RNA, 22 nt, synthetic construct
  source 1..22: mol_type = other RNA
gtgaagatgctgccagtggggc

SEQ ID NO: 10404 - RNA, 22 nt, synthetic construct
  source 1..22: mol_type = other RNA
gtgaagtacatattaggaaaat

SEQ ID NO: 10405 - RNA, 22 nt, synthetic construct
  source 1..22: mol_type = other RNA
gtgaagtataagaagggtggcc

SEQ ID NO: 10406 - RNA, 22 nt, synthetic construct
  source 1..22: mol_type = other RNA
gtgacctgaggatttaagggat

SEQ ID NO: 10407 - RNA, 22 nt, synthetic construct
  source 1..22: mol_type = other RNA
gtgagggtcttcttacatgcat

SEQ ID NO: 10408 - RNA, 22 nt, synthetic construct
  source 1..22: mol_type = other RNA
gtgagttaaaaggtgtcctttt

SEQ ID NO: 10409 - RNA, 22 nt, synthetic construct
  source 1..22: mol_type = other RNA
gtgagttgaggagctacagaca

SEQ ID NO: 10410 - RNA, 22 nt, synthetic construct
  source 1..22: mol_type = other RNA
gtgatcaatgaaactgggctgt

SEQ ID NO: 10411 - RNA, 22 nt, synthetic construct
  source 1..22: mol_type = other RNA
gtgatgatggaggggaagatga

SEQ ID NO: 10412 - RNA, 22 nt, synthetic construct
  source 1..22: mol_type = other RNA
gtgcaattgtaggggtgtgtgt

SEQ ID NO: 10413 - RNA, 22 nt, synthetic construct
  source 1..22: mol_type = other RNA
gtgcagtagctcatcatcttcc

SEQ ID NO: 10414 - RNA, 22 nt, synthetic construct
  source 1..22: mol_type = other RNA
gtgcatttttgtgaaatgaaaa

SEQ ID NO: 10415 - RNA, 22 nt, synthetic construct
  source 1..22: mol_type = other RNA
gtgcctgagagtatttaggcag

SEQ ID NO: 10416 - RNA, 22 nt, synthetic construct
  source 1..22: mol_type = other RNA
gtgcctgtaacaaagaatcata

SEQ ID NO: 10417 - RNA, 22 nt, synthetic construct
  source 1..22: mol_type = other RNA
gtgctgatcatttatatgtcaa

SEQ ID NO: 10418 - RNA, 22 nt, synthetic construct
  source 1..22: mol_type = other RNA
gtgcttaaaaatcattgattgt

SEQ ID NO: 10419 - RNA, 22 nt, synthetic construct
  source 1..22: mol_type = other RNA
gtgcttctcttagagcttatat

SEQ ID NO: 10420 - RNA, 22 nt, synthetic construct
  source 1..22: mol_type = other RNA
gtggaccttgagaccacagggt

SEQ ID NO: 10421 - RNA, 22 nt, synthetic construct
  source 1..22: mol_type = other RNA
gtggccttgtgatcaatgaaac

SEQ ID NO: 10422 - RNA, 22 nt, synthetic construct
  source 1..22: mol_type = other RNA
gtggctcaggggcaggttgttg

SEQ ID NO: 10423 - RNA, 22 nt, synthetic construct
  source 1..22: mol_type = other RNA
gtgggcccgcagcagctacctg

SEQ ID NO: 10424 - RNA, 22 nt, synthetic construct
  source 1..22: mol_type = other RNA
gtgggccttgctacctcaaggg

SEQ ID NO: 10425 - RNA, 22 nt, synthetic construct
  source 1..22: mol_type = other RNA
gtggggcattggcctctttcag

SEQ ID NO: 10426 - RNA, 22 nt, synthetic construct
  source 1..22: mol_type = other RNA
gtggtctcaaggtccacttggt

SEQ ID NO: 10427 - RNA, 22 nt, synthetic construct
  source 1..22: mol_type = other RNA
gtgtagaacacctggtagctgc

SEQ ID NO: 10428 - RNA, 22 nt, synthetic construct
  source 1..22: mol_type = other RNA
gtgtatgactaaagagagaatg

SEQ ID NO: 10429 - RNA, 22 nt, synthetic construct
  source 1..22: mol_type = other RNA
gtgtatttccagtgcaattgta

SEQ ID NO: 10430 - RNA, 22 nt, synthetic construct
  source 1..22: mol_type = other RNA
gtgtccttttcaatctgcctaa

SEQ ID NO: 10431 - RNA, 22 nt, synthetic construct
  source 1..22: mol_type = other RNA
gtgtcttcccattccagaggca

SEQ ID NO: 10432 - RNA, 22 nt, synthetic construct
  source 1..22: mol_type = other RNA
gtgtgtatgactaaagagagaa

SEQ ID NO: 10433 - RNA, 22 nt, synthetic construct
  source 1..22: mol_type = other RNA
gtgtgtgtatgactaaagagag

SEQ ID NO: 10434 - RNA, 22 nt, synthetic construct
  source 1..22: mol_type = other RNA
gtgtgtgtgtatgactaaagag

SEQ ID NO: 10435 - RNA, 22 nt, synthetic construct
  source 1..22: mol_type = other RNA
gtgttaggaatgaaatgagtcc

SEQ ID NO: 10436 - RNA, 22 nt, synthetic construct
  source 1..22: mol_type = other RNA
gtgttcaatcttaccagtgctg

SEQ ID NO: 10437 - RNA, 22 nt, synthetic construct
  source 1..22: mol_type = other RNA
gtgttctacactcatcttagtg

SEQ ID NO: 10438 - RNA, 22 nt, synthetic construct
  source 1..22: mol_type = other RNA
gttaaaaggtgtccttttcaat

SEQ ID NO: 10439 - RNA, 22 nt, synthetic construct
  source 1..22: mol_type = other RNA
gttacaggcaccgagaatgttg

SEQ ID NO: 10440 - RNA, 22 nt, synthetic construct
  source 1..22: mol_type = other RNA
gttaggaatgaaatgagtcccc

SEQ ID NO: 10441 - RNA, 22 nt, synthetic construct
  source 1..22: mol_type = other RNA
gttagtttcaccgatggctcag

SEQ ID NO: 10442 - RNA, 22 nt, synthetic construct
  source 1..22: mol_type = other RNA
gttcaaaatgtctgtagctcct

SEQ ID NO: 10443 - RNA, 22 nt, synthetic construct
  source 1..22: mol_type = other RNA
gttcaatcttaccagtgctgat

SEQ ID NO: 10444 - RNA, 22 nt, synthetic construct
  source 1..22: mol_type = other RNA
gttcatgtcttcttacttgacc

SEQ ID NO: 10445 - RNA, 22 nt, synthetic construct
  source 1..22: mol_type = other RNA
gttcctcatgtagaccttgtgg

SEQ ID NO: 10446 - RNA, 22 nt, synthetic construct
  source 1..22: mol_type = other RNA
gttctacactcatcttagtgcc

SEQ ID NO: 10447 - RNA, 22 nt, synthetic construct
  source 1..22: mol_type = other RNA
gttctatgttcttccgtcatat

SEQ ID NO: 10448 - RNA, 22 nt, synthetic construct
  source 1..22: mol_type = other RNA
gttcttccgtcatattcctcca

SEQ ID NO: 10449 - RNA, 22 nt, synthetic construct
  source 1..22: mol_type = other RNA
gttgaaagctccttttggattt

SEQ ID NO: 10450 - RNA, 22 nt, synthetic construct
  source 1..22: mol_type = other RNA
gttgacatataaatgatcagca

SEQ ID NO: 10451 - RNA, 22 nt, synthetic construct
  source 1..22: mol_type = other RNA
gttgaggagctacagacatttt

SEQ ID NO: 10452 - RNA, 22 nt, synthetic construct
  source 1..22: mol_type = other RNA
gttgattgtcaggaagcattca

SEQ ID NO: 10453 - RNA, 22 nt, synthetic construct
  source 1..22: mol_type = other RNA
gttgcaagattgaccccggaag

SEQ ID NO: 10454 - RNA, 22 nt, synthetic construct
  source 1..22: mol_type = other RNA
gttgcatttggtcaagattttg

SEQ ID NO: 10455 - RNA, 22 nt, synthetic construct
  source 1..22: mol_type = other RNA
gttggacttgcctgaaataaat

SEQ ID NO: 10456 - RNA, 22 nt, synthetic construct
  source 1..22: mol_type = other RNA
gttgtattcagtgagggtcttc

SEQ ID NO: 10457 - RNA, 22 nt, synthetic construct
  source 1..22: mol_type = other RNA
gttgtgacctgaggatttaagg

SEQ ID NO: 10458 - RNA, 22 nt, synthetic construct
  source 1..22: mol_type = other RNA
gttgttgcaagattgaccccgg

SEQ ID NO: 10459 - RNA, 22 nt, synthetic construct
  source 1..22: mol_type = other RNA
gtttatgagccagacaaatgga

SEQ ID NO: 10460 - RNA, 22 nt, synthetic construct
  source 1..22: mol_type = other RNA
gtttcaccgatggctcaggata

SEQ ID NO: 10461 - RNA, 22 nt, synthetic construct
  source 1..22: mol_type = other RNA
gtttcattgatcacaaggccac

SEQ ID NO: 10462 - RNA, 22 nt, synthetic construct
  source 1..22: mol_type = other RNA
gttttcatttcacaaaaatgca

SEQ ID NO: 10463 - RNA, 22 nt, synthetic construct
  source 1..22: mol_type = other RNA
gttttggggactcatttcattc

SEQ ID NO: 10464 - RNA, 22 nt, synthetic construct
  source 1..22: mol_type = other RNA
gtttttcggcttatataagctc

SEQ ID NO: 10465 - RNA, 22 nt, synthetic construct
  source 1..22: mol_type = other RNA
taaaaatcattgattgtcagct

SEQ ID NO: 10466 - RNA, 22 nt, synthetic construct
  source 1..22: mol_type = other RNA
taaaaggtgtccttttcaatct

SEQ ID NO: 10467 - RNA, 22 nt, synthetic construct
  source 1..22: mol_type = other RNA
taaacattaggtgagttgagga

SEQ ID NO: 10468 - RNA, 22 nt, synthetic construct
  source 1..22: mol_type = other RNA
taaagagagaatgtagatattg

SEQ ID NO: 10469 - RNA, 22 nt, synthetic construct
  source 1..22: mol_type = other RNA
taaagaggctgaaagaggccaa

SEQ ID NO: 10470 - RNA, 22 nt, synthetic construct
  source 1..22: mol_type = other RNA
taaatactctcaggcactaaga

SEQ ID NO: 10471 - RNA, 22 nt, synthetic construct
  source 1..22: mol_type = other RNA
taaatccaaaaggagctttcaa

SEQ ID NO: 10472 - RNA, 22 nt, synthetic construct
  source 1..22: mol_type = other RNA
taaatcctcaggtcacaaccat

SEQ ID NO: 10473 - RNA, 22 nt, synthetic construct
  source 1..22: mol_type = other RNA
taaatgatcagcactggtaaga

SEQ ID NO: 10474 - RNA, 22 nt, synthetic construct
  source 1..22: mol_type = other RNA
taaatgcatatcctgagccatc

SEQ ID NO: 10475 - RNA, 22 nt, synthetic construct
  source 1..22: mol_type = other RNA
taacacagcatgtgtatttcca

SEQ ID NO: 10476 - RNA, 22 nt, synthetic construct
  source 1..22: mol_type = other RNA
taacagataagcaagagagatg

SEQ ID NO: 10477 - RNA, 22 nt, synthetic construct
  source 1..22: mol_type = other RNA
taactcacctctcaaggtgggc

SEQ ID NO: 10478 - RNA, 22 nt, synthetic construct
  source 1..22: mol_type = other RNA
taagaagacatgaaccaagtgg

SEQ ID NO: 10479 - RNA, 22 nt, synthetic construct
  source 1..22: mol_type = other RNA
taagaagaccctcactgaatac

SEQ ID NO: 10480 - RNA, 22 nt, synthetic construct
  source 1..22: mol_type = other RNA
taagaagggtggccttgtgatc

SEQ ID NO: 10481 - RNA, 22 nt, synthetic construct
  source 1..22: mol_type = other RNA
taagagaagcactttgggattc

SEQ ID NO: 10482 - RNA, 22 nt, synthetic construct
  source 1..22: mol_type = other RNA
taagatgagtgtagaacacctg

SEQ ID NO: 10483 - RNA, 22 nt, synthetic construct
  source 1..22: mol_type = other RNA
taagattgaacactgcccccag

SEQ ID NO: 10484 - RNA, 22 nt, synthetic construct
  source 1..22: mol_type = other RNA
taagcaagagagatgttttggg

SEQ ID NO: 10485 - RNA, 22 nt, synthetic construct
  source 1..22: mol_type = other RNA
taagcactattagagttgattg

SEQ ID NO: 10486 - RNA, 22 nt, synthetic construct
  source 1..22: mol_type = other RNA
taagccgaaaaacgtctgagat

SEQ ID NO: 10487 - RNA, 22 nt, synthetic construct
  source 1..22: mol_type = other RNA
taagctaaagaggctgaaagag

SEQ ID NO: 10488 - RNA, 22 nt, synthetic construct
  source 1..22: mol_type = other RNA
taagctctaagagaagcacttt

SEQ ID NO: 10489 - RNA, 22 nt, synthetic construct
  source 1..22: mol_type = other RNA
taagggatggaaaaggaagact

SEQ ID NO: 10490 - RNA, 22 nt, synthetic construct
  source 1..22: mol_type = other RNA
taagtatccccaggatctggtg

SEQ ID NO: 10491 - RNA, 22 nt, synthetic construct
  source 1..22: mol_type = other RNA
taataagctaaagaggctgaaa

SEQ ID NO: 10492 - RNA, 22 nt, synthetic construct
  source 1..22: mol_type = other RNA
taatggaaagaatcccaaagtg

SEQ ID NO: 10493 - RNA, 22 nt, synthetic construct
  source 1..22: mol_type = other RNA
taatgtttatgagccagacaaa

SEQ ID NO: 10494 - RNA, 22 nt, synthetic construct
  source 1..22: mol_type = other RNA
tacaaagtacagcccagtttca

SEQ ID NO: 10495 - RNA, 22 nt, synthetic construct
  source 1..22: mol_type = other RNA
tacaacattctcggtgcctgta

SEQ ID NO: 10496 - RNA, 22 nt, synthetic construct
  source 1..22: mol_type = other RNA
tacaattgcactggaaatacac

SEQ ID NO: 10497 - RNA, 22 nt, synthetic construct
  source 1..22: mol_type = other RNA
tacacatgctgtgttaggaatg

SEQ ID NO: 10498 - RNA, 22 nt, synthetic construct
  source 1..22: mol_type = other RNA
tacactcatcttagtgcctgag

SEQ ID NO: 10499 - RNA, 22 nt, synthetic construct
  source 1..22: mol_type = other RNA
tacagacattttgaaccctgtg

SEQ ID NO: 10500 - RNA, 22 nt, synthetic construct
  source 1..22: mol_type = other RNA
tacagcccagtttcattgatca

SEQ ID NO: 10501 - RNA, 22 nt, synthetic construct
  source 1..22: mol_type = other RNA
tacaggcaccgagaatgttgta

SEQ ID NO: 10502 - RNA, 22 nt, synthetic construct
  source 1..22: mol_type = other RNA
tacatattaggaaaatatgggt

SEQ ID NO: 10503 - RNA, 22 nt, synthetic construct
  source 1..22: mol_type = other RNA
tacatgaggaactctaagtatc

SEQ ID NO: 10504 - RNA, 22 nt, synthetic construct
  source 1..22: mol_type = other RNA
tacatgcatttgaggtcaagta

SEQ ID NO: 10505 - RNA, 22 nt, synthetic construct
  source 1..22: mol_type = other RNA
tacatggttgtgacctgaggat

SEQ ID NO: 10506 - RNA, 22 nt, synthetic construct
  source 1..22: mol_type = other RNA
tacattctctctttagtcatac

SEQ ID NO: 10507 - RNA, 22 nt, synthetic construct
  source 1..22: mol_type = other RNA
taccaggtgttctacactcatc

SEQ ID NO: 10508 - RNA, 22 nt, synthetic construct
  source 1..22: mol_type = other RNA
taccagtgctgatcatttatat

SEQ ID NO: 10509 - RNA, 22 nt, synthetic construct
  source 1..22: mol_type = other RNA
tacctcaagggggactgtcttt

SEQ ID NO: 10510 - RNA, 22 nt, synthetic construct
  source 1..22: mol_type = other RNA
tacctgggggcagtgttcaatc

SEQ ID NO: 10511 - RNA, 22 nt, synthetic construct
  source 1..22: mol_type = other RNA
tacgttgacatataaatgatca

SEQ ID NO: 10512 - RNA, 22 nt, synthetic construct
  source 1..22: mol_type = other RNA
tactctcaggcactaagatgag

SEQ ID NO: 10513 - RNA, 22 nt, synthetic construct
  source 1..22: mol_type = other RNA
tactgcactactgggcagatgt

SEQ ID NO: 10514 - RNA, 22 nt, synthetic construct
  source 1..22: mol_type = other RNA
tactgggcagatgtgggcccgc

SEQ ID NO: 10515 - RNA, 22 nt, synthetic construct
  source 1..22: mol_type = other RNA
tacttagagttcctcatgtaga

SEQ ID NO: 10516 - RNA, 22 nt, synthetic construct
  source 1..22: mol_type = other RNA
tacttcacaatatctacattct

SEQ ID NO: 10517 - RNA, 22 nt, synthetic construct
  source 1..22: mol_type = other RNA
tacttcactccagaaagcagga

SEQ ID NO: 10518 - RNA, 22 nt, synthetic construct
  source 1..22: mol_type = other RNA
tacttccggggtcaatcttgca

SEQ ID NO: 10519 - RNA, 22 nt, synthetic construct
  source 1..22: mol_type = other RNA
tacttgacctcaaatgcatgta

SEQ ID NO: 10520 - RNA, 22 nt, synthetic construct
  source 1..22: mol_type = other RNA
tactttggaatatacaaagtac

SEQ ID NO: 10521 - RNA, 22 nt, synthetic construct
  source 1..22: mol_type = other RNA
tagaacacctggtagctgcttt

SEQ ID NO: 10522 - RNA, 22 nt, synthetic construct
  source 1..22: mol_type = other RNA
tagaactctgggctgccatgtg

SEQ ID NO: 10523 - RNA, 22 nt, synthetic construct
  source 1..22: mol_type = other RNA
tagaagtgaagatgctgccagt

SEQ ID NO: 10524 - RNA, 22 nt, synthetic construct
  source 1..22: mol_type = other RNA
tagaccttgtggctcaggggca

SEQ ID NO: 10525 - RNA, 22 nt, synthetic construct
  source 1..22: mol_type = other RNA
tagagcttatataagccgaaaa

SEQ ID NO: 10526 - RNA, 22 nt, synthetic construct
  source 1..22: mol_type = other RNA
tagaggcttgcataataagcta

SEQ ID NO: 10527 - RNA, 22 nt, synthetic construct
  source 1..22: mol_type = other RNA
tagagttcctcatgtagacctt

SEQ ID NO: 10528 - RNA, 22 nt, synthetic construct
  source 1..22: mol_type = other RNA
tagagttgattgtcaggaagca

SEQ ID NO: 10529 - RNA, 22 nt, synthetic construct
  source 1..22: mol_type = other RNA
tagatgtgcatttttgtgaaat

SEQ ID NO: 10530 - RNA, 22 nt, synthetic construct
  source 1..22: mol_type = other RNA
tagcaaggcccaccttgagagg

SEQ ID NO: 10531 - RNA, 22 nt, synthetic construct
  source 1..22: mol_type = other RNA
tagctcatcatcttcccctcca

SEQ ID NO: 10532 - RNA, 22 nt, synthetic construct
  source 1..22: mol_type = other RNA
tagctcctcaactcacctaatg

SEQ ID NO: 10533 - RNA, 22 nt, synthetic construct
  source 1..22: mol_type = other RNA
tagctgacaatcaatgattttt

SEQ ID NO: 10534 - RNA, 22 nt, synthetic construct
  source 1..22: mol_type = other RNA
tagctgctgcgggcccacatct

SEQ ID NO: 10535 - RNA, 22 nt, synthetic construct
  source 1..22: mol_type = other RNA
tagctgctttttcatgcttctc

SEQ ID NO: 10536 - RNA, 22 nt, synthetic construct
  source 1..22: mol_type = other RNA
tagcttattatgcaagcctcta

SEQ ID NO: 10537 - RNA, 22 nt, synthetic construct
  source 1..22: mol_type = other RNA
taggaaaacatcattagtagct

SEQ ID NO: 10538 - RNA, 22 nt, synthetic construct
  source 1..22: mol_type = other RNA
taggaaaatatgggttgcattt

SEQ ID NO: 10539 - RNA, 22 nt, synthetic construct
  source 1..22: mol_type = other RNA
taggaatgaaatgagtccccaa

SEQ ID NO: 10540 - RNA, 22 nt, synthetic construct
  source 1..22: mol_type = other RNA
taggcagattgaaaaggacacc

SEQ ID NO: 10541 - RNA, 22 nt, synthetic construct
  source 1..22: mol_type = other RNA
taggtgagttgaggagctacag

SEQ ID NO: 10542 - RNA, 22 nt, synthetic construct
  source 1..22: mol_type = other RNA
taggtgtcttcccattccagag

SEQ ID NO: 10543 - RNA, 22 nt, synthetic construct
  source 1..22: mol_type = other RNA
tagtagctgacaatcaatgatt

SEQ ID NO: 10544 - RNA, 22 nt, synthetic construct
  source 1..22: mol_type = other RNA
tagtcttccttttccatccctt

SEQ ID NO: 10545 - RNA, 22 nt, synthetic construct
  source 1..22: mol_type = other RNA
tagtgcagtagctcatcatctt

SEQ ID NO: 10546 - RNA, 22 nt, synthetic construct
  source 1..22: mol_type = other RNA
tagtgcctgagagtatttaggc

SEQ ID NO: 10547 - RNA, 22 nt, synthetic construct
  source 1..22: mol_type = other RNA
tagtttcaccgatggctcagga

SEQ ID NO: 10548 - RNA, 22 nt, synthetic construct
  source 1..22: mol_type = other RNA
tataaatgatcagcactggtaa

SEQ ID NO: 10549 - RNA, 22 nt, synthetic construct
  source 1..22: mol_type = other RNA
tataagaagggtggccttgtga

SEQ ID NO: 10550 - RNA, 22 nt, synthetic construct
  source 1..22: mol_type = other RNA
tataagccgaaaaacgtctgag

SEQ ID NO: 10551 - RNA, 22 nt, synthetic construct
  source 1..22: mol_type = other RNA
tataagctctaagagaagcact

SEQ ID NO: 10552 - RNA, 22 nt, synthetic construct
  source 1..22: mol_type = other RNA
tatacaaagtacagcccagttt

SEQ ID NO: 10553 - RNA, 22 nt, synthetic construct
  source 1..22: mol_type = other RNA
tatacttcactccagaaagcag

SEQ ID NO: 10554 - RNA, 22 nt, synthetic construct
  source 1..22: mol_type = other RNA
tatacttccggggtcaatcttg

SEQ ID NO: 10555 - RNA, 22 nt, synthetic construct
  source 1..22: mol_type = other RNA
tataggaaaacatcattagtag

SEQ ID NO: 10556 - RNA, 22 nt, synthetic construct
  source 1..22: mol_type = other RNA
tatataagccgaaaaacgtctg

SEQ ID NO: 10557 - RNA, 22 nt, synthetic construct
  source 1..22: mol_type = other RNA
tatataagctctaagagaagca

SEQ ID NO: 10558 - RNA, 22 nt, synthetic construct
  source 1..22: mol_type = other RNA
tatatgtcaacgtatctgagct

SEQ ID NO: 10559 - RNA, 22 nt, synthetic construct
  source 1..22: mol_type = other RNA
tatattccaaagtatacttccg

SEQ ID NO: 10560 - RNA, 22 nt, synthetic construct
  source 1..22: mol_type = other RNA
tatccccaggatctggtgatga

SEQ ID NO: 10561 - RNA, 22 nt, synthetic construct
  source 1..22: mol_type = other RNA
tatcctgagccatcggtgaaac

SEQ ID NO: 10562 - RNA, 22 nt, synthetic construct
  source 1..22: mol_type = other RNA
tatctacattctctctttagtc

SEQ ID NO: 10563 - RNA, 22 nt, synthetic construct
  source 1..22: mol_type = other RNA
tatctgaaagacagtccccctt

SEQ ID NO: 10564 - RNA, 22 nt, synthetic construct
  source 1..22: mol_type = other RNA
tatctgagctctctctggtcaa

SEQ ID NO: 10565 - RNA, 22 nt, synthetic construct
  source 1..22: mol_type = other RNA
tatctgttagtttcaccgatgg

SEQ ID NO: 10566 - RNA, 22 nt, synthetic construct
  source 1..22: mol_type = other RNA
tatgacggaagaacatagaact

SEQ ID NO: 10567 - RNA, 22 nt, synthetic construct
  source 1..22: mol_type = other RNA
tatgactaaagagagaatgtag

SEQ ID NO: 10568 - RNA, 22 nt, synthetic construct
  source 1..22: mol_type = other RNA
tatgagccagacaaatggagga

SEQ ID NO: 10569 - RNA, 22 nt, synthetic construct
  source 1..22: mol_type = other RNA
tatgattctttgttacaggcac

SEQ ID NO: 10570 - RNA, 22 nt, synthetic construct
  source 1..22: mol_type = other RNA
tatgcaagcctctagtcttcct

SEQ ID NO: 10571 - RNA, 22 nt, synthetic construct
  source 1..22: mol_type = other RNA
tatgcatttagaagtgaagatg

SEQ ID NO: 10572 - RNA, 22 nt, synthetic construct
  source 1..22: mol_type = other RNA
tatggaattgtcctgctttctg

SEQ ID NO: 10573 - RNA, 22 nt, synthetic construct
  source 1..22: mol_type = other RNA
tatgggttgcatttggtcaaga

SEQ ID NO: 10574 - RNA, 22 nt, synthetic construct
  source 1..22: mol_type = other RNA
tatgtacttcacaatatctaca

SEQ ID NO: 10575 - RNA, 22 nt, synthetic construct
  source 1..22: mol_type = other RNA
tatgtagatgtgcatttttgtg

SEQ ID NO: 10576 - RNA, 22 nt, synthetic construct
  source 1..22: mol_type = other RNA
tatgtcaacgtatctgagctct

SEQ ID NO: 10577 - RNA, 22 nt, synthetic construct
  source 1..22: mol_type = other RNA
tatgttcttccgtcatattcct

SEQ ID NO: 10578 - RNA, 22 nt, synthetic construct
  source 1..22: mol_type = other RNA
tattagagttgattgtcaggaa

SEQ ID NO: 10579 - RNA, 22 nt, synthetic construct
  source 1..22: mol_type = other RNA
tattaggaaaatatgggttgca

SEQ ID NO: 10580 - RNA, 22 nt, synthetic construct
  source 1..22: mol_type = other RNA
tattatgcaagcctctagtctt

SEQ ID NO: 10581 - RNA, 22 nt, synthetic construct
  source 1..22: mol_type = other RNA
tattcagtgagggtcttcttac

SEQ ID NO: 10582 - RNA, 22 nt, synthetic construct
  source 1..22: mol_type = other RNA
tattccaaagtatacttccggg

SEQ ID NO: 10583 - RNA, 22 nt, synthetic construct
  source 1..22: mol_type = other RNA
tattcctccatttgtctggctc

SEQ ID NO: 10584 - RNA, 22 nt, synthetic construct
  source 1..22: mol_type = other RNA
tattccttgttgaaagctcctt

SEQ ID NO: 10585 - RNA, 22 nt, synthetic construct
  source 1..22: mol_type = other RNA
tattgtgaagtacatattagga

SEQ ID NO: 10586 - RNA, 22 nt, synthetic construct
  source 1..22: mol_type = other RNA
tatttaggcagattgaaaagga

SEQ ID NO: 10587 - RNA, 22 nt, synthetic construct
  source 1..22: mol_type = other RNA
tatttcaggcaagtccaactca

SEQ ID NO: 10588 - RNA, 22 nt, synthetic construct
  source 1..22: mol_type = other RNA
tatttccagtgcaattgtaggg

SEQ ID NO: 10589 - RNA, 22 nt, synthetic construct
  source 1..22: mol_type = other RNA
tcaaaatcttgaccaaatgcaa

SEQ ID NO: 10590 - RNA, 22 nt, synthetic construct
  source 1..22: mol_type = other RNA
tcaaaatgtctgtagctcctca

SEQ ID NO: 10591 - RNA, 22 nt, synthetic construct
  source 1..22: mol_type = other RNA
tcaaaattgaccagagagagct

SEQ ID NO: 10592 - RNA, 22 nt, synthetic construct
  source 1..22: mol_type = other RNA
tcaaatgcatgtaagaagaccc

SEQ ID NO: 10593 - RNA, 22 nt, synthetic construct
  source 1..22: mol_type = other RNA
tcaacgtatctgagctctctct

SEQ ID NO: 10594 - RNA, 22 nt, synthetic construct
  source 1..22: mol_type = other RNA
tcaactcacctaatgtttatga

SEQ ID NO: 10595 - RNA, 22 nt, synthetic construct
  source 1..22: mol_type = other RNA
tcaactctaatagtgcttaaaa

SEQ ID NO: 10596 - RNA, 22 nt, synthetic construct
  source 1..22: mol_type = other RNA
tcaagattttgaatgcttcctg

SEQ ID NO: 10597 - RNA, 22 nt, synthetic construct
  source 1..22: mol_type = other RNA
tcaagggggactgtctttcaga

SEQ ID NO: 10598 - RNA, 22 nt, synthetic construct
  source 1..22: mol_type = other RNA
tcaaggtccacttggttcatgt

SEQ ID NO: 10599 - RNA, 22 nt, synthetic construct
  source 1..22: mol_type = other RNA
tcaaggtccatgcctctggaat

SEQ ID NO: 10600 - RNA, 22 nt, synthetic construct
  source 1..22: mol_type = other RNA
tcaaggtgggccttgctacctc

SEQ ID NO: 10601 - RNA, 22 nt, synthetic construct
  source 1..22: mol_type = other RNA
tcaagtaagaagacatgaacca

SEQ ID NO: 10602 - RNA, 22 nt, synthetic construct
  source 1..22: mol_type = other RNA
tcaatctgcctaaatactctca

SEQ ID NO: 10603 - RNA, 22 nt, synthetic construct
  source 1..22: mol_type = other RNA
tcaatcttaccagtgctgatca

SEQ ID NO: 10604 - RNA, 22 nt, synthetic construct
  source 1..22: mol_type = other RNA
tcaatcttgcaacaacctgccc

SEQ ID NO: 10605 - RNA, 22 nt, synthetic construct
  source 1..22: mol_type = other RNA
tcaatgaaactgggctgtactt

SEQ ID NO: 10606 - RNA, 22 nt, synthetic construct
  source 1..22: mol_type = other RNA
tcaattttgaggaatctcagac

SEQ ID NO: 10607 - RNA, 22 nt, synthetic construct
  source 1..22: mol_type = other RNA
tcacaaaaatgcacatctacat

SEQ ID NO: 10608 - RNA, 22 nt, synthetic construct
  source 1..22: mol_type = other RNA
tcacaaccatgtatctgaaaga

SEQ ID NO: 10609 - RNA, 22 nt, synthetic construct
  source 1..22: mol_type = other RNA
tcacaaggccacccttcttata

SEQ ID NO: 10610 - RNA, 22 nt, synthetic construct
  source 1..22: mol_type = other RNA
tcacaatatctacattctctct

SEQ ID NO: 10611 - RNA, 22 nt, synthetic construct
  source 1..22: mol_type = other RNA
tcacatggcagcccagagttct

SEQ ID NO: 10612 - RNA, 22 nt, synthetic construct
  source 1..22: mol_type = other RNA
tcaccagatcctggggatactt

SEQ ID NO: 10613 - RNA, 22 nt, synthetic construct
  source 1..22: mol_type = other RNA
tcaccgatggctcaggatatgc

SEQ ID NO: 10614 - RNA, 22 nt, synthetic construct
  source 1..22: mol_type = other RNA
tcacctaatgtttatgagccag

SEQ ID NO: 10615 - RNA, 22 nt, synthetic construct
  source 1..22: mol_type = other RNA
tcacctctcaaggtgggccttg

SEQ ID NO: 10616 - RNA, 22 nt, synthetic construct
  source 1..22: mol_type = other RNA
tcactccagaaagcaggacaat

SEQ ID NO: 10617 - RNA, 22 nt, synthetic construct
  source 1..22: mol_type = other RNA
tcactgaatacaacattctcgg

SEQ ID NO: 10618 - RNA, 22 nt, synthetic construct
  source 1..22: mol_type = other RNA
tcacttctaaatgcatatcctg

SEQ ID NO: 10619 - RNA, 22 nt, synthetic construct
  source 1..22: mol_type = other RNA
tcagacgtttttcggcttatat

SEQ ID NO: 10620 - RNA, 22 nt, synthetic construct
  source 1..22: mol_type = other RNA
tcagatacatggttgtgacctg

SEQ ID NO: 10621 - RNA, 22 nt, synthetic construct
  source 1..22: mol_type = other RNA
tcagatacgttgacatataaat

SEQ ID NO: 10622 - RNA, 22 nt, synthetic construct
  source 1..22: mol_type = other RNA
tcagcactggtaagattgaaca

SEQ ID NO: 10623 - RNA, 22 nt, synthetic construct
  source 1..22: mol_type = other RNA
tcagcctctttagcttattatg

SEQ ID NO: 10624 - RNA, 22 nt, synthetic construct
  source 1..22: mol_type = other RNA
tcagctactaatgatgttttcc

SEQ ID NO: 10625 - RNA, 22 nt, synthetic construct
  source 1..22: mol_type = other RNA
tcaggaagcattcaaaatcttg

SEQ ID NO: 10626 - RNA, 22 nt, synthetic construct
  source 1..22: mol_type = other RNA
tcaggatatgcatttagaagtg

SEQ ID NO: 10627 - RNA, 22 nt, synthetic construct
  source 1..22: mol_type = other RNA
tcaggcaagtccaactcaaggt

SEQ ID NO: 10628 - RNA, 22 nt, synthetic construct
  source 1..22: mol_type = other RNA
tcaggcactaagatgagtgtag

SEQ ID NO: 10629 - RNA, 22 nt, synthetic construct
  source 1..22: mol_type = other RNA
tcaggggcaggttgttgcaaga

SEQ ID NO: 10630 - RNA, 22 nt, synthetic construct
  source 1..22: mol_type = other RNA
tcaggtcacaaccatgtatctg

SEQ ID NO: 10631 - RNA, 22 nt, synthetic construct
  source 1..22: mol_type = other RNA
tcagtgagggtcttcttacatg

SEQ ID NO: 10632 - RNA, 22 nt, synthetic construct
  source 1..22: mol_type = other RNA
tcataaacattaggtgagttga

SEQ ID NO: 10633 - RNA, 22 nt, synthetic construct
  source 1..22: mol_type = other RNA
tcataatggaaagaatcccaaa

SEQ ID NO: 10634 - RNA, 22 nt, synthetic construct
  source 1..22: mol_type = other RNA
tcatattcctccatttgtctgg

SEQ ID NO: 10635 - RNA, 22 nt, synthetic construct
  source 1..22: mol_type = other RNA
tcatcaccagatcctggggata

SEQ ID NO: 10636 - RNA, 22 nt, synthetic construct
  source 1..22: mol_type = other RNA
tcatcatcttcccctccatcat

SEQ ID NO: 10637 - RNA, 22 nt, synthetic construct
  source 1..22: mol_type = other RNA
tcatcttagtgcctgagagtat

SEQ ID NO: 10638 - RNA, 22 nt, synthetic construct
  source 1..22: mol_type = other RNA
tcatcttcccctccatcatcac

SEQ ID NO: 10639 - RNA, 22 nt, synthetic construct
  source 1..22: mol_type = other RNA
tcatgcttctccctcttcacat

SEQ ID NO: 10640 - RNA, 22 nt, synthetic construct
  source 1..22: mol_type = other RNA
tcatgtagaccttgtggctcag

SEQ ID NO: 10641 - RNA, 22 nt, synthetic construct
  source 1..22: mol_type = other RNA
tcatgtcttcttacttgacctc

SEQ ID NO: 10642 - RNA, 22 nt, synthetic construct
  source 1..22: mol_type = other RNA
tcattagtagctgacaatcaat

SEQ ID NO: 10643 - RNA, 22 nt, synthetic construct
  source 1..22: mol_type = other RNA
tcattcctaacacagcatgtgt

SEQ ID NO: 10644 - RNA, 22 nt, synthetic construct
  source 1..22: mol_type = other RNA
tcattgatcacaaggccaccct

SEQ ID NO: 10645 - RNA, 22 nt, synthetic construct
  source 1..22: mol_type = other RNA
tcattgattgtcagctactaat

SEQ ID NO: 10646 - RNA, 22 nt, synthetic construct
  source 1..22: mol_type = other RNA
tcatttatatgtcaacgtatct

SEQ ID NO: 10647 - RNA, 22 nt, synthetic construct
  source 1..22: mol_type = other RNA
tcatttcacaaaaatgcacatc

SEQ ID NO: 10648 - RNA, 22 nt, synthetic construct
  source 1..22: mol_type = other RNA
tcatttcattcctaacacagca

SEQ ID NO: 10649 - RNA, 22 nt, synthetic construct
  source 1..22: mol_type = other RNA
tccaaaaggagctttcaacaag

SEQ ID NO: 10650 - RNA, 22 nt, synthetic construct
  source 1..22: mol_type = other RNA
tccaaagtatacttccggggtc

SEQ ID NO: 10651 - RNA, 22 nt, synthetic construct
  source 1..22: mol_type = other RNA
tccaactcaaggtccatgcctc

SEQ ID NO: 10652 - RNA, 22 nt, synthetic construct
  source 1..22: mol_type = other RNA
tccacttggttcatgtcttctt

SEQ ID NO: 10653 - RNA, 22 nt, synthetic construct
  source 1..22: mol_type = other RNA
tccagaaagcaggacaattcca

SEQ ID NO: 10654 - RNA, 22 nt, synthetic construct
  source 1..22: mol_type = other RNA
tccagaggcatggaccttgagt

SEQ ID NO: 10655 - RNA, 22 nt, synthetic construct
  source 1..22: mol_type = other RNA
tccagtgcaattgtaggggtgt

SEQ ID NO: 10656 - RNA, 22 nt, synthetic construct
  source 1..22: mol_type = other RNA
tccataggtgtcttcccattcc

SEQ ID NO: 10657 - RNA, 22 nt, synthetic construct
  source 1..22: mol_type = other RNA
tccatcatcaccagatcctggg

SEQ ID NO: 10658 - RNA, 22 nt, synthetic construct
  source 1..22: mol_type = other RNA
tccatcccttaaatcctcaggt

SEQ ID NO: 10659 - RNA, 22 nt, synthetic construct
  source 1..22: mol_type = other RNA
tccatgcctctggaatgggaag

SEQ ID NO: 10660 - RNA, 22 nt, synthetic construct
  source 1..22: mol_type = other RNA
tccattatgattctttgttaca

SEQ ID NO: 10661 - RNA, 22 nt, synthetic construct
  source 1..22: mol_type = other RNA
tccatttgtctggctcataaac

SEQ ID NO: 10662 - RNA, 22 nt, synthetic construct
  source 1..22: mol_type = other RNA
tcccaaagtgcttctcttagag

SEQ ID NO: 10663 - RNA, 22 nt, synthetic construct
  source 1..22: mol_type = other RNA
tcccattccagaggcatggacc

SEQ ID NO: 10664 - RNA, 22 nt, synthetic construct
  source 1..22: mol_type = other RNA
tccccaaaacatctctcttgct

SEQ ID NO: 10665 - RNA, 22 nt, synthetic construct
  source 1..22: mol_type = other RNA
tccccaggatctggtgatgatg

SEQ ID NO: 10666 - RNA, 22 nt, synthetic construct
  source 1..22: mol_type = other RNA
tcccccttgaggtagcaaggcc

SEQ ID NO: 10667 - RNA, 22 nt, synthetic construct
  source 1..22: mol_type = other RNA
tcccctccatcatcaccagatc

SEQ ID NO: 10668 - RNA, 22 nt, synthetic construct
  source 1..22: mol_type = other RNA
tccctcttcacatggcagccca

SEQ ID NO: 10669 - RNA, 22 nt, synthetic construct
  source 1..22: mol_type = other RNA
tcccttaaatcctcaggtcaca

SEQ ID NO: 10670 - RNA, 22 nt, synthetic construct
  source 1..22: mol_type = other RNA
tccggggtcaatcttgcaacaa

SEQ ID NO: 10671 - RNA, 22 nt, synthetic construct
  source 1..22: mol_type = other RNA
tccgtcatattcctccatttgt

SEQ ID NO: 10672 - RNA, 22 nt, synthetic construct
  source 1..22: mol_type = other RNA
tcctaacacagcatgtgtattt

SEQ ID NO: 10673 - RNA, 22 nt, synthetic construct
  source 1..22: mol_type = other RNA
tcctaatatgtacttcacaata

SEQ ID NO: 10674 - RNA, 22 nt, synthetic construct
  source 1..22: mol_type = other RNA
tcctcaaaattgaccagagaga

SEQ ID NO: 10675 - RNA, 22 nt, synthetic construct
  source 1..22: mol_type = other RNA
tcctcaactcacctaatgttta

SEQ ID NO: 10676 - RNA, 22 nt, synthetic construct
  source 1..22: mol_type = other RNA
tcctcaggtcacaaccatgtat

SEQ ID NO: 10677 - RNA, 22 nt, synthetic construct
  source 1..22: mol_type = other RNA
tcctcatgtagaccttgtggct

SEQ ID NO: 10678 - RNA, 22 nt, synthetic construct
  source 1..22: mol_type = other RNA
tcctccatttgtctggctcata

SEQ ID NO: 10679 - RNA, 22 nt, synthetic construct
  source 1..22: mol_type = other RNA
tcctgacaatcaactctaatag

SEQ ID NO: 10680 - RNA, 22 nt, synthetic construct
  source 1..22: mol_type = other RNA
tcctgagccatcggtgaaacta

SEQ ID NO: 10681 - RNA, 22 nt, synthetic construct
  source 1..22: mol_type = other RNA
tcctgctttctggagtgaagta

SEQ ID NO: 10682 - RNA, 22 nt, synthetic construct
  source 1..22: mol_type = other RNA
tcctggggatacttagagttcc

SEQ ID NO: 10683 - RNA, 22 nt, synthetic construct
  source 1..22: mol_type = other RNA
tccttgttgaaagctccttttg

SEQ ID NO: 10684 - RNA, 22 nt, synthetic construct
  source 1..22: mol_type = other RNA
tccttttcaatctgcctaaata

SEQ ID NO: 10685 - RNA, 22 nt, synthetic construct
  source 1..22: mol_type = other RNA
tccttttccatcccttaaatcc

SEQ ID NO: 10686 - RNA, 22 nt, synthetic construct
  source 1..22: mol_type = other RNA
tccttttggatttatttcaggc

SEQ ID NO: 10687 - RNA, 22 nt, synthetic construct
  source 1..22: mol_type = other RNA
tcggcttatataagctctaaga

SEQ ID NO: 10688 - RNA, 22 nt, synthetic construct
  source 1..22: mol_type = other RNA
tcggtgaaactaacagataagc

SEQ ID NO: 10689 - RNA, 22 nt, synthetic construct
  source 1..22: mol_type = other RNA
tcggtgcctgtaacaaagaatc

SEQ ID NO: 10690 - RNA, 22 nt, synthetic construct
  source 1..22: mol_type = other RNA
tctaaatgcatatcctgagcca

SEQ ID NO: 10691 - RNA, 22 nt, synthetic construct
  source 1..22: mol_type = other RNA
tctaagagaagcactttgggat

SEQ ID NO: 10692 - RNA, 22 nt, synthetic construct
  source 1..22: mol_type = other RNA
tctaagtatccccaggatctgg

SEQ ID NO: 10693 - RNA, 22 nt, synthetic construct
  source 1..22: mol_type = other RNA
tctacactcatcttagtgcctg

SEQ ID NO: 10694 - RNA, 22 nt, synthetic construct
  source 1..22: mol_type = other RNA
tctacatgaggaactctaagta

SEQ ID NO: 10695 - RNA, 22 nt, synthetic construct
  source 1..22: mol_type = other RNA
tctacattctctctttagtcat

SEQ ID NO: 10696 - RNA, 22 nt, synthetic construct
  source 1..22: mol_type = other RNA
tctagtcttccttttccatccc

SEQ ID NO: 10697 - RNA, 22 nt, synthetic construct
  source 1..22: mol_type = other RNA
tctatgttcttccgtcatattc

SEQ ID NO: 10698 - RNA, 22 nt, synthetic construct
  source 1..22: mol_type = other RNA
tctcaaggtccacttggttcat

SEQ ID NO: 10699 - RNA, 22 nt, synthetic construct
  source 1..22: mol_type = other RNA
tctcaaggtgggccttgctacc

SEQ ID NO: 10700 - RNA, 22 nt, synthetic construct
  source 1..22: mol_type = other RNA
tctcagacgtttttcggcttat

SEQ ID NO: 10701 - RNA, 22 nt, synthetic construct
  source 1..22: mol_type = other RNA
tctcaggcactaagatgagtgt

SEQ ID NO: 10702 - RNA, 22 nt, synthetic construct
  source 1..22: mol_type = other RNA
tctccctcttcacatggcagcc

SEQ ID NO: 10703 - RNA, 22 nt, synthetic construct
  source 1..22: mol_type = other RNA
tctcggtgcctgtaacaaagaa

SEQ ID NO: 10704 - RNA, 22 nt, synthetic construct
  source 1..22: mol_type = other RNA
tctctctggtcaattttgagga

SEQ ID NO: 10705 - RNA, 22 nt, synthetic construct
  source 1..22: mol_type = other RNA
tctctcttgcttatctgttagt

SEQ ID NO: 10706 - RNA, 22 nt, synthetic construct
  source 1..22: mol_type = other RNA
tctctctttagtcatacacaca

SEQ ID NO: 10707 - RNA, 22 nt, synthetic construct
  source 1..22: mol_type = other RNA
tctctggtcaattttgaggaat

SEQ ID NO: 10708 - RNA, 22 nt, synthetic construct
  source 1..22: mol_type = other RNA
tctcttagagcttatataagcc

SEQ ID NO: 10709 - RNA, 22 nt, synthetic construct
  source 1..22: mol_type = other RNA
tctcttgcttatctgttagttt

SEQ ID NO: 10710 - RNA, 22 nt, synthetic construct
  source 1..22: mol_type = other RNA
tctctttagtcatacacacaca

SEQ ID NO: 10711 - RNA, 22 nt, synthetic construct
  source 1..22: mol_type = other RNA
tctgaaagacagtcccccttga

SEQ ID NO: 10712 - RNA, 22 nt, synthetic construct
  source 1..22: mol_type = other RNA
tctgagattcctcaaaattgac

SEQ ID NO: 10713 - RNA, 22 nt, synthetic construct
  source 1..22: mol_type = other RNA
tctgagctctctctggtcaatt

SEQ ID NO: 10714 - RNA, 22 nt, synthetic construct
  source 1..22: mol_type = other RNA
tctgcccagtagtgcagtagct

SEQ ID NO: 10715 - RNA, 22 nt, synthetic construct
  source 1..22: mol_type = other RNA
tctgcctaaatactctcaggca

SEQ ID NO: 10716 - RNA, 22 nt, synthetic construct
  source 1..22: mol_type = other RNA
tctggaatgggaagacacctat

SEQ ID NO: 10717 - RNA, 22 nt, synthetic construct
  source 1..22: mol_type = other RNA
tctggagtgaagtataagaagg

SEQ ID NO: 10718 - RNA, 22 nt, synthetic construct
  source 1..22: mol_type = other RNA
tctggctcataaacattaggtg

SEQ ID NO: 10719 - RNA, 22 nt, synthetic construct
  source 1..22: mol_type = other RNA
tctgggctgccatgtgaagagg

SEQ ID NO: 10720 - RNA, 22 nt, synthetic construct
  source 1..22: mol_type = other RNA
tctggtcaattttgaggaatct

SEQ ID NO: 10721 - RNA, 22 nt, synthetic construct
  source 1..22: mol_type = other RNA
tctggtgatgatggaggggaag

SEQ ID NO: 10722 - RNA, 22 nt, synthetic construct
  source 1..22: mol_type = other RNA
tctgtagctcctcaactcacct

SEQ ID NO: 10723 - RNA, 22 nt, synthetic construct
  source 1..22: mol_type = other RNA
tctgttagtttcaccgatggct

SEQ ID NO: 10724 - RNA, 22 nt, synthetic construct
  source 1..22: mol_type = other RNA
tcttacatgcatttgaggtcaa

SEQ ID NO: 10725 - RNA, 22 nt, synthetic construct
  source 1..22: mol_type = other RNA
tcttaccagtgctgatcattta

SEQ ID NO: 10726 - RNA, 22 nt, synthetic construct
  source 1..22: mol_type = other RNA
tcttacttgacctcaaatgcat

SEQ ID NO: 10727 - RNA, 22 nt, synthetic construct
  source 1..22: mol_type = other RNA
tcttagagcttatataagccga

SEQ ID NO: 10728 - RNA, 22 nt, synthetic construct
  source 1..22: mol_type = other RNA
tcttagtgcctgagagtattta

SEQ ID NO: 10729 - RNA, 22 nt, synthetic construct
  source 1..22: mol_type = other RNA
tcttatacttcactccagaaag

SEQ ID NO: 10730 - RNA, 22 nt, synthetic construct
  source 1..22: mol_type = other RNA
tcttcacatggcagcccagagt

SEQ ID NO: 10731 - RNA, 22 nt, synthetic construct
  source 1..22: mol_type = other RNA
tcttcacttctaaatgcatatc

SEQ ID NO: 10732 - RNA, 22 nt, synthetic construct
  source 1..22: mol_type = other RNA
tcttcccattccagaggcatgg

SEQ ID NO: 10733 - RNA, 22 nt, synthetic construct
  source 1..22: mol_type = other RNA
tcttcccctccatcatcaccag

SEQ ID NO: 10734 - RNA, 22 nt, synthetic construct
  source 1..22: mol_type = other RNA
tcttccgtcatattcctccatt

SEQ ID NO: 10735 - RNA, 22 nt, synthetic construct
  source 1..22: mol_type = other RNA
tcttccttttccatcccttaaa

SEQ ID NO: 10736 - RNA, 22 nt, synthetic construct
  source 1..22: mol_type = other RNA
tcttcttacatgcatttgaggt

SEQ ID NO: 10737 - RNA, 22 nt, synthetic construct
  source 1..22: mol_type = other RNA
tcttcttacttgacctcaaatg

SEQ ID NO: 10738 - RNA, 22 nt, synthetic construct
  source 1..22: mol_type = other RNA
tcttgaccaaatgcaacccata

SEQ ID NO: 10739 - RNA, 22 nt, synthetic construct
  source 1..22: mol_type = other RNA
tcttgcaacaacctgcccctga

SEQ ID NO: 10740 - RNA, 22 nt, synthetic construct
  source 1..22: mol_type = other RNA
tcttgcttatctgttagtttca

SEQ ID NO: 10741 - RNA, 22 nt, synthetic construct
  source 1..22: mol_type = other RNA
tctttagcttattatgcaagcc

SEQ ID NO: 10742 - RNA, 22 nt, synthetic construct
  source 1..22: mol_type = other RNA
tctttagtcatacacacacaca

SEQ ID NO: 10743 - RNA, 22 nt, synthetic construct
  source 1..22: mol_type = other RNA
tctttcagatacatggttgtga

SEQ ID NO: 10744 - RNA, 22 nt, synthetic construct
  source 1..22: mol_type = other RNA
tctttcagcctctttagcttat

SEQ ID NO: 10745 - RNA, 22 nt, synthetic construct
  source 1..22: mol_type = other RNA
tctttccattatgattctttgt

SEQ ID NO: 10746 - RNA, 22 nt, synthetic construct
  source 1..22: mol_type = other RNA
tctttgttacaggcaccgagaa

SEQ ID NO: 10747 - RNA, 22 nt, synthetic construct
  source 1..22: mol_type = other RNA
tgaaaaagcagctaccaggtgt

SEQ ID NO: 10748 - RNA, 22 nt, synthetic construct
  source 1..22: mol_type = other RNA
tgaaaaggacaccttttaactc

SEQ ID NO: 10749 - RNA, 22 nt, synthetic construct
  source 1..22: mol_type = other RNA
tgaaactaacagataagcaaga

SEQ ID NO: 10750 - RNA, 22 nt, synthetic construct
  source 1..22: mol_type = other RNA
tgaaactgggctgtactttgta

SEQ ID NO: 10751 - RNA, 22 nt, synthetic construct
  source 1..22: mol_type = other RNA
tgaaagacagtcccccttgagg

SEQ ID NO: 10752 - RNA, 22 nt, synthetic construct
  source 1..22: mol_type = other RNA
tgaaagaggccaatgccccact

SEQ ID NO: 10753 - RNA, 22 nt, synthetic construct
  source 1..22: mol_type = other RNA
tgaaagctccttttggatttat

SEQ ID NO: 10754 - RNA, 22 nt, synthetic construct
  source 1..22: mol_type = other RNA
tgaaataaatccaaaaggagct

SEQ ID NO: 10755 - RNA, 22 nt, synthetic construct
  source 1..22: mol_type = other RNA
tgaaatgagtccccaaaacatc

SEQ ID NO: 10756 - RNA, 22 nt, synthetic construct
  source 1..22: mol_type = other RNA
tgaacactgcccccaggtagct

SEQ ID NO: 10757 - RNA, 22 nt, synthetic construct
  source 1..22: mol_type = other RNA
tgaaccaagtggaccttgagac

SEQ ID NO: 10758 - RNA, 22 nt, synthetic construct
  source 1..22: mol_type = other RNA
tgaaccctgtggtctcaaggtc

SEQ ID NO: 10759 - RNA, 22 nt, synthetic construct
  source 1..22: mol_type = other RNA
tgaagagggagaagcatgaaaa

SEQ ID NO: 10760 - RNA, 22 nt, synthetic construct
  source 1..22: mol_type = other RNA
tgaagatgctgccagtggggca

SEQ ID NO: 10761 - RNA, 22 nt, synthetic construct
  source 1..22: mol_type = other RNA
tgaagtataagaagggtggcct

SEQ ID NO: 10762 - RNA, 22 nt, synthetic construct
  source 1..22: mol_type = other RNA
tgaatacaacattctcggtgcc

SEQ ID NO: 10763 - RNA, 22 nt, synthetic construct
  source 1..22: mol_type = other RNA
tgaatgcttcctgacaatcaac

SEQ ID NO: 10764 - RNA, 22 nt, synthetic construct
  source 1..22: mol_type = other RNA
tgacaatcaactctaatagtgc

SEQ ID NO: 10765 - RNA, 22 nt, synthetic construct
  source 1..22: mol_type = other RNA
tgacaatcaatgatttttaagc

SEQ ID NO: 10766 - RNA, 22 nt, synthetic construct
  source 1..22: mol_type = other RNA
tgacatataaatgatcagcact

SEQ ID NO: 10767 - RNA, 22 nt, synthetic construct
  source 1..22: mol_type = other RNA
tgaccaaatgcaacccatattt

SEQ ID NO: 10768 - RNA, 22 nt, synthetic construct
  source 1..22: mol_type = other RNA
tgaccagagagagctcagatac

SEQ ID NO: 10769 - RNA, 22 nt, synthetic construct
  source 1..22: mol_type = other RNA
tgaccccggaagtatactttgg

SEQ ID NO: 10770 - RNA, 22 nt, synthetic construct
  source 1..22: mol_type = other RNA
tgacctcaaatgcatgtaagaa

SEQ ID NO: 10771 - RNA, 22 nt, synthetic construct
  source 1..22: mol_type = other RNA
tgacctgaggatttaagggatg

SEQ ID NO: 10772 - RNA, 22 nt, synthetic construct
  source 1..22: mol_type = other RNA
tgacggaagaacatagaactct

SEQ ID NO: 10773 - RNA, 22 nt, synthetic construct
  source 1..22: mol_type = other RNA
tgactaaagagagaatgtagat

SEQ ID NO: 10774 - RNA, 22 nt, synthetic construct
  source 1..22: mol_type = other RNA
tgactattccttgttgaaagct

SEQ ID NO: 10775 - RNA, 22 nt, synthetic construct
  source 1..22: mol_type = other RNA
tgagaccacagggttcaaaatg

SEQ ID NO: 10776 - RNA, 22 nt, synthetic construct
  source 1..22: mol_type = other RNA
tgagaggtgagttaaaaggtgt

SEQ ID NO: 10777 - RNA, 22 nt, synthetic construct
  source 1..22: mol_type = other RNA
tgagagtatttaggcagattga

SEQ ID NO: 10778 - RNA, 22 nt, synthetic construct
  source 1..22: mol_type = other RNA
tgagattcctcaaaattgacca

SEQ ID NO: 10779 - RNA, 22 nt, synthetic construct
  source 1..22: mol_type = other RNA
tgagccacaaggtctacatgag

SEQ ID NO: 10780 - RNA, 22 nt, synthetic construct
  source 1..22: mol_type = other RNA
tgagccagacaaatggaggaat

SEQ ID NO: 10781 - RNA, 22 nt, synthetic construct
  source 1..22: mol_type = other RNA
tgagccatcggtgaaactaaca

SEQ ID NO: 10782 - RNA, 22 nt, synthetic construct
  source 1..22: mol_type = other RNA
tgagctactgcactactgggca

SEQ ID NO: 10783 - RNA, 22 nt, synthetic construct
  source 1..22: mol_type = other RNA
tgagctctctctggtcaatttt

SEQ ID NO: 10784 - RNA, 22 nt, synthetic construct
  source 1..22: mol_type = other RNA
tgaggaactctaagtatcccca

SEQ ID NO: 10785 - RNA, 22 nt, synthetic construct
  source 1..22: mol_type = other RNA
tgaggaatctcagacgtttttc

SEQ ID NO: 10786 - RNA, 22 nt, synthetic construct
  source 1..22: mol_type = other RNA
tgaggagctacagacattttga

SEQ ID NO: 10787 - RNA, 22 nt, synthetic construct
  source 1..22: mol_type = other RNA
tgaggatttaagggatggaaaa

SEQ ID NO: 10788 - RNA, 22 nt, synthetic construct
  source 1..22: mol_type = other RNA
tgagggtcttcttacatgcatt

SEQ ID NO: 10789 - RNA, 22 nt, synthetic construct
  source 1..22: mol_type = other RNA
tgaggtagcaaggcccaccttg

SEQ ID NO: 10790 - RNA, 22 nt, synthetic construct
  source 1..22: mol_type = other RNA
tgaggtcaagtaagaagacatg

SEQ ID NO: 10791 - RNA, 22 nt, synthetic construct
  source 1..22: mol_type = other RNA
tgagtccccaaaacatctctct

SEQ ID NO: 10792 - RNA, 22 nt, synthetic construct
  source 1..22: mol_type = other RNA
tgagtgtagaacacctggtagc

SEQ ID NO: 10793 - RNA, 22 nt, synthetic construct
  source 1..22: mol_type = other RNA
tgagttaaaaggtgtccttttc

SEQ ID NO: 10794 - RNA, 22 nt, synthetic construct
  source 1..22: mol_type = other RNA
tgagttgaggagctacagacat

SEQ ID NO: 10795 - RNA, 22 nt, synthetic construct
  source 1..22: mol_type = other RNA
tgagttggacttgcctgaaata

SEQ ID NO: 10796 - RNA, 22 nt, synthetic construct
  source 1..22: mol_type = other RNA
tgatcaatgaaactgggctgta

SEQ ID NO: 10797 - RNA, 22 nt, synthetic construct
  source 1..22: mol_type = other RNA
tgatcacaaggccacccttctt

SEQ ID NO: 10798 - RNA, 22 nt, synthetic construct
  source 1..22: mol_type = other RNA
tgatcagcactggtaagattga

SEQ ID NO: 10799 - RNA, 22 nt, synthetic construct
  source 1..22: mol_type = other RNA
tgatcatttatatgtcaacgta

SEQ ID NO: 10800 - RNA, 22 nt, synthetic construct
  source 1..22: mol_type = other RNA
tgatgagctactgcactactgg

SEQ ID NO: 10801 - RNA, 22 nt, synthetic construct
  source 1..22: mol_type = other RNA
tgatgatggaggggaagatgat

SEQ ID NO: 10802 - RNA, 22 nt, synthetic construct
  source 1..22: mol_type = other RNA
tgatggaggggaagatgatgag

SEQ ID NO: 10803 - RNA, 22 nt, synthetic construct
  source 1..22: mol_type = other RNA
tgattctttgttacaggcaccg

SEQ ID NO: 10804 - RNA, 22 nt, synthetic construct
  source 1..22: mol_type = other RNA
tgattgtcagctactaatgatg

SEQ ID NO: 10805 - RNA, 22 nt, synthetic construct
  source 1..22: mol_type = other RNA
tgattgtcaggaagcattcaaa

SEQ ID NO: 10806 - RNA, 22 nt, synthetic construct
  source 1..22: mol_type = other RNA
tgatttttaagcactattagag

SEQ ID NO: 10807 - RNA, 22 nt, synthetic construct
  source 1..22: mol_type = other RNA
tgcaacaacctgcccctgagcc

SEQ ID NO: 10808 - RNA, 22 nt, synthetic construct
  source 1..22: mol_type = other RNA
tgcaacccatattttcctaata

SEQ ID NO: 10809 - RNA, 22 nt, synthetic construct
  source 1..22: mol_type = other RNA
tgcaagattgaccccggaagta

SEQ ID NO: 10810 - RNA, 22 nt, synthetic construct
  source 1..22: mol_type = other RNA
tgcaagcctctagtcttccttt

SEQ ID NO: 10811 - RNA, 22 nt, synthetic construct
  source 1..22: mol_type = other RNA
tgcaattgtaggggtgtgtgtg

SEQ ID NO: 10812 - RNA, 22 nt, synthetic construct
  source 1..22: mol_type = other RNA
tgcactactgggcagatgtggg

SEQ ID NO: 10813 - RNA, 22 nt, synthetic construct
  source 1..22: mol_type = other RNA
tgcactggaaatacacatgctg

SEQ ID NO: 10814 - RNA, 22 nt, synthetic construct
  source 1..22: mol_type = other RNA
tgcagtagctcatcatcttccc

SEQ ID NO: 10815 - RNA, 22 nt, synthetic construct
  source 1..22: mol_type = other RNA
tgcataataagctaaagaggct

SEQ ID NO: 10816 - RNA, 22 nt, synthetic construct
  source 1..22: mol_type = other RNA
tgcatatcctgagccatcggtg

SEQ ID NO: 10817 - RNA, 22 nt, synthetic construct
  source 1..22: mol_type = other RNA
tgcatgactattccttgttgaa

SEQ ID NO: 10818 - RNA, 22 nt, synthetic construct
  source 1..22: mol_type = other RNA
tgcatgtaagaagaccctcact

SEQ ID NO: 10819 - RNA, 22 nt, synthetic construct
  source 1..22: mol_type = other RNA
tgcatttagaagtgaagatgct

SEQ ID NO: 10820 - RNA, 22 nt, synthetic construct
  source 1..22: mol_type = other RNA
tgcatttgaggtcaagtaagaa

SEQ ID NO: 10821 - RNA, 22 nt, synthetic construct
  source 1..22: mol_type = other RNA
tgcatttggtcaagattttgaa

SEQ ID NO: 10822 - RNA, 22 nt, synthetic construct
  source 1..22: mol_type = other RNA
tgcatttttgtgaaatgaaaac

SEQ ID NO: 10823 - RNA, 22 nt, synthetic construct
  source 1..22: mol_type = other RNA
tgccagtggggcattggcctct

SEQ ID NO: 10824 - RNA, 22 nt, synthetic construct
  source 1..22: mol_type = other RNA
tgccatgtgaagagggagaagc

SEQ ID NO: 10825 - RNA, 22 nt, synthetic construct
  source 1..22: mol_type = other RNA
tgcccagtagtgcagtagctca

SEQ ID NO: 10826 - RNA, 22 nt, synthetic construct
  source 1..22: mol_type = other RNA
tgccccactggcagcatcttca

SEQ ID NO: 10827 - RNA, 22 nt, synthetic construct
  source 1..22: mol_type = other RNA
tgcccccaggtagctgctgcgg

SEQ ID NO: 10828 - RNA, 22 nt, synthetic construct
  source 1..22: mol_type = other RNA
tgcccctgagccacaaggtcta

SEQ ID NO: 10829 - RNA, 22 nt, synthetic construct
  source 1..22: mol_type = other RNA
tgcctaaatactctcaggcact

SEQ ID NO: 10830 - RNA, 22 nt, synthetic construct
  source 1..22: mol_type = other RNA
tgcctctggaatgggaagacac

SEQ ID NO: 10831 - RNA, 22 nt, synthetic construct
  source 1..22: mol_type = other RNA
tgcctgaaataaatccaaaagg

SEQ ID NO: 10832 - RNA, 22 nt, synthetic construct
  source 1..22: mol_type = other RNA
tgcctgagagtatttaggcaga

SEQ ID NO: 10833 - RNA, 22 nt, synthetic construct
  source 1..22: mol_type = other RNA
tgcctgtaacaaagaatcataa

SEQ ID NO: 10834 - RNA, 22 nt, synthetic construct
  source 1..22: mol_type = other RNA
tgcgggcccacatctgcccagt

SEQ ID NO: 10835 - RNA, 22 nt, synthetic construct
  source 1..22: mol_type = other RNA
tgctacctcaagggggactgtc

SEQ ID NO: 10836 - RNA, 22 nt, synthetic construct
  source 1..22: mol_type = other RNA
tgctgatcatttatatgtcaac

SEQ ID NO: 10837 - RNA, 22 nt, synthetic construct
  source 1..22: mol_type = other RNA
tgctgccagtggggcattggcc

SEQ ID NO: 10838 - RNA, 22 nt, synthetic construct
  source 1..22: mol_type = other RNA
tgctgcgggcccacatctgccc

SEQ ID NO: 10839 - RNA, 22 nt, synthetic construct
  source 1..22: mol_type = other RNA
tgctgtgttaggaatgaaatga

SEQ ID NO: 10840 - RNA, 22 nt, synthetic construct
  source 1..22: mol_type = other RNA
tgcttaaaaatcattgattgtc

SEQ ID NO: 10841 - RNA, 22 nt, synthetic construct
  source 1..22: mol_type = other RNA
tgcttatctgttagtttcaccg

SEQ ID NO: 10842 - RNA, 22 nt, synthetic construct
  source 1..22: mol_type = other RNA
tgcttcctgacaatcaactcta

SEQ ID NO: 10843 - RNA, 22 nt, synthetic construct
  source 1..22: mol_type = other RNA
tgcttctccctcttcacatggc

SEQ ID NO: 10844 - RNA, 22 nt, synthetic construct
  source 1..22: mol_type = other RNA
tgcttctcttagagcttatata

SEQ ID NO: 10845 - RNA, 22 nt, synthetic construct
  source 1..22: mol_type = other RNA
tgctttctggagtgaagtataa

SEQ ID NO: 10846 - RNA, 22 nt, synthetic construct
  source 1..22: mol_type = other RNA
tgctttttcatgcttctccctc

SEQ ID NO: 10847 - RNA, 22 nt, synthetic construct
  source 1..22: mol_type = other RNA
tggaaaaggaagactagaggct

SEQ ID NO: 10848 - RNA, 22 nt, synthetic construct
  source 1..22: mol_type = other RNA
tggaaagaatcccaaagtgctt

SEQ ID NO: 10849 - RNA, 22 nt, synthetic construct
  source 1..22: mol_type = other RNA
tggaaatacacatgctgtgtta

SEQ ID NO: 10850 - RNA, 22 nt, synthetic construct
  source 1..22: mol_type = other RNA
tggaatatacaaagtacagccc

SEQ ID NO: 10851 - RNA, 22 nt, synthetic construct
  source 1..22: mol_type = other RNA
tggaatgggaagacacctatgg

SEQ ID NO: 10852 - RNA, 22 nt, synthetic construct
  source 1..22: mol_type = other RNA
tggaattgtcctgctttctgga

SEQ ID NO: 10853 - RNA, 22 nt, synthetic construct
  source 1..22: mol_type = other RNA
tggaccttgagaccacagggtt

SEQ ID NO: 10854 - RNA, 22 nt, synthetic construct
  source 1..22: mol_type = other RNA
tggaccttgagttggacttgcc

SEQ ID NO: 10855 - RNA, 22 nt, synthetic construct
  source 1..22: mol_type = other RNA
tggacttgcctgaaataaatcc

SEQ ID NO: 10856 - RNA, 22 nt, synthetic construct
  source 1..22: mol_type = other RNA
tggaggaatatgacggaagaac

SEQ ID NO: 10857 - RNA, 22 nt, synthetic construct
  source 1..22: mol_type = other RNA
tggaggggaagatgatgagcta

SEQ ID NO: 10858 - RNA, 22 nt, synthetic construct
  source 1..22: mol_type = other RNA
tggagtgaagtataagaagggt

SEQ ID NO: 10859 - RNA, 22 nt, synthetic construct
  source 1..22: mol_type = other RNA
tggatttatttcaggcaagtcc

SEQ ID NO: 10860 - RNA, 22 nt, synthetic construct
  source 1..22: mol_type = other RNA
tggcagcatcttcacttctaaa

SEQ ID NO: 10861 - RNA, 22 nt, synthetic construct
  source 1..22: mol_type = other RNA
tggcagcccagagttctatgtt

SEQ ID NO: 10862 - RNA, 22 nt, synthetic construct
  source 1..22: mol_type = other RNA
tggcctctttcagcctctttag

SEQ ID NO: 10863 - RNA, 22 nt, synthetic construct
  source 1..22: mol_type = other RNA
tggccttgtgatcaatgaaact

SEQ ID NO: 10864 - RNA, 22 nt, synthetic construct
  source 1..22: mol_type = other RNA
tggctcaggatatgcatttaga

SEQ ID NO: 10865 - RNA, 22 nt, synthetic construct
  source 1..22: mol_type = other RNA
tggctcaggggcaggttgttgc

SEQ ID NO: 10866 - RNA, 22 nt, synthetic construct
  source 1..22: mol_type = other RNA
tggctcataaacattaggtgag

SEQ ID NO: 10867 - RNA, 22 nt, synthetic construct
  source 1..22: mol_type = other RNA
tgggaagacacctatggaattg

SEQ ID NO: 10868 - RNA, 22 nt, synthetic construct
  source 1..22: mol_type = other RNA
tgggattctttccattatgatt

SEQ ID NO: 10869 - RNA, 22 nt, synthetic construct
  source 1..22: mol_type = other RNA
tgggcagatgtgggcccgcagc

SEQ ID NO: 10870 - RNA, 22 nt, synthetic construct
  source 1..22: mol_type = other RNA
tgggcccgcagcagctacctgg

SEQ ID NO: 10871 - RNA, 22 nt, synthetic construct
  source 1..22: mol_type = other RNA
tgggccttgctacctcaagggg

SEQ ID NO: 10872 - RNA, 22 nt, synthetic construct
  source 1..22: mol_type = other RNA
tgggctgccatgtgaagaggga

SEQ ID NO: 10873 - RNA, 22 nt, synthetic construct
  source 1..22: mol_type = other RNA
tgggctgtactttgtatattcc

SEQ ID NO: 10874 - RNA, 22 nt, synthetic construct
  source 1..22: mol_type = other RNA
tggggactcatttcattcctaa

SEQ ID NO: 10875 - RNA, 22 nt, synthetic construct
  source 1..22: mol_type = other RNA
tggggatacttagagttcctca

SEQ ID NO: 10876 - RNA, 22 nt, synthetic construct
  source 1..22: mol_type = other RNA
tggggcattggcctctttcagc

SEQ ID NO: 10877 - RNA, 22 nt, synthetic construct
  source 1..22: mol_type = other RNA
tgggggcagtgttcaatcttac

SEQ ID NO: 10878 - RNA, 22 nt, synthetic construct
  source 1..22: mol_type = other RNA
tgggttgcatttggtcaagatt

SEQ ID NO: 10879 - RNA, 22 nt, synthetic construct
  source 1..22: mol_type = other RNA
tggtaagattgaacactgcccc

SEQ ID NO: 10880 - RNA, 22 nt, synthetic construct
  source 1..22: mol_type = other RNA
tggtagctgctttttcatgctt

SEQ ID NO: 10881 - RNA, 22 nt, synthetic construct
  source 1..22: mol_type = other RNA
tggtcaagattttgaatgcttc

SEQ ID NO: 10882 - RNA, 22 nt, synthetic construct
  source 1..22: mol_type = other RNA
tggtcaattttgaggaatctca

SEQ ID NO: 10883 - RNA, 22 nt, synthetic construct
  source 1..22: mol_type = other RNA
tggtctcaaggtccacttggtt

SEQ ID NO: 10884 - RNA, 22 nt, synthetic construct
  source 1..22: mol_type = other RNA
tggtgatgatggaggggaagat

SEQ ID NO: 10885 - RNA, 22 nt, synthetic construct
  source 1..22: mol_type = other RNA
tggttcatgtcttcttacttga

SEQ ID NO: 10886 - RNA, 22 nt, synthetic construct
  source 1..22: mol_type = other RNA
tggttgtgacctgaggatttaa

SEQ ID NO: 10887 - RNA, 22 nt, synthetic construct
  source 1..22: mol_type = other RNA
tgtaacaaagaatcataatgga

SEQ ID NO: 10888 - RNA, 22 nt, synthetic construct
  source 1..22: mol_type = other RNA
tgtaagaagaccctcactgaat

SEQ ID NO: 10889 - RNA, 22 nt, synthetic construct
  source 1..22: mol_type = other RNA
tgtacttcacaatatctacatt

SEQ ID NO: 10890 - RNA, 22 nt, synthetic construct
  source 1..22: mol_type = other RNA
tgtactttgtatattccaaagt

SEQ ID NO: 10891 - RNA, 22 nt, synthetic construct
  source 1..22: mol_type = other RNA
tgtagaacacctggtagctgct

SEQ ID NO: 10892 - RNA, 22 nt, synthetic construct
  source 1..22: mol_type = other RNA
tgtagaccttgtggctcagggg

SEQ ID NO: 10893 - RNA, 22 nt, synthetic construct
  source 1..22: mol_type = other RNA
tgtagatattgtgaagtacata

SEQ ID NO: 10894 - RNA, 22 nt, synthetic construct
  source 1..22: mol_type = other RNA
tgtagatgtgcatttttgtgaa

SEQ ID NO: 10895 - RNA, 22 nt, synthetic construct
  source 1..22: mol_type = other RNA
tgtagctcctcaactcacctaa

SEQ ID NO: 10896 - RNA, 22 nt, synthetic construct
  source 1..22: mol_type = other RNA
tgtatattccaaagtatacttc

SEQ ID NO: 10897 - RNA, 22 nt, synthetic construct
  source 1..22: mol_type = other RNA
tgtatctgaaagacagtccccc

SEQ ID NO: 10898 - RNA, 22 nt, synthetic construct
  source 1..22: mol_type = other RNA
tgtatgactaaagagagaatgt

SEQ ID NO: 10899 - RNA, 22 nt, synthetic construct
  source 1..22: mol_type = other RNA
tgtattcagtgagggtcttctt

SEQ ID NO: 10900 - RNA, 22 nt, synthetic construct
  source 1..22: mol_type = other RNA
tgtatttccagtgcaattgtag

SEQ ID NO: 10901 - RNA, 22 nt, synthetic construct
  source 1..22: mol_type = other RNA
tgtcaacgtatctgagctctct

SEQ ID NO: 10902 - RNA, 22 nt, synthetic construct
  source 1..22: mol_type = other RNA
tgtcagctactaatgatgtttt

SEQ ID NO: 10903 - RNA, 22 nt, synthetic construct
  source 1..22: mol_type = other RNA
tgtcaggaagcattcaaaatct

SEQ ID NO: 10904 - RNA, 22 nt, synthetic construct
  source 1..22: mol_type = other RNA
tgtcctgctttctggagtgaag

SEQ ID NO: 10905 - RNA, 22 nt, synthetic construct
  source 1..22: mol_type = other RNA
tgtccttttcaatctgcctaaa

SEQ ID NO: 10906 - RNA, 22 nt, synthetic construct
  source 1..22: mol_type = other RNA
tgtctggctcataaacattagg

SEQ ID NO: 10907 - RNA, 22 nt, synthetic construct
  source 1..22: mol_type = other RNA
tgtctgtagctcctcaactcac

SEQ ID NO: 10908 - RNA, 22 nt, synthetic construct
  source 1..22: mol_type = other RNA
tgtcttcccattccagaggcat

SEQ ID NO: 10909 - RNA, 22 nt, synthetic construct
  source 1..22: mol_type = other RNA
tgtcttcttacttgacctcaaa

SEQ ID NO: 10910 - RNA, 22 nt, synthetic construct
  source 1..22: mol_type = other RNA
tgtctttcagatacatggttgt

SEQ ID NO: 10911 - RNA, 22 nt, synthetic construct
  source 1..22: mol_type = other RNA
tgtgaagagggagaagcatgaa

SEQ ID NO: 10912 - RNA, 22 nt, synthetic construct
  source 1..22: mol_type = other RNA
tgtgaagtacatattaggaaaa

SEQ ID NO: 10913 - RNA, 22 nt, synthetic construct
  source 1..22: mol_type = other RNA
tgtgacctgaggatttaaggga

SEQ ID NO: 10914 - RNA, 22 nt, synthetic construct
  source 1..22: mol_type = other RNA
tgtgatcaatgaaactgggctg

SEQ ID NO: 10915 - RNA, 22 nt, synthetic construct
  source 1..22: mol_type = other RNA
tgtgcatttttgtgaaatgaaa

SEQ ID NO: 10916 - RNA, 22 nt, synthetic construct
  source 1..22: mol_type = other RNA
tgtggctcaggggcaggttgtt

SEQ ID NO: 10917 - RNA, 22 nt, synthetic construct
  source 1..22: mol_type = other RNA
tgtgggcccgcagcagctacct

SEQ ID NO: 10918 - RNA, 22 nt, synthetic construct
  source 1..22: mol_type = other RNA
tgtggtctcaaggtccacttgg

SEQ ID NO: 10919 - RNA, 22 nt, synthetic construct
  source 1..22: mol_type = other RNA
tgtgtatgactaaagagagaat

SEQ ID NO: 10920 - RNA, 22 nt, synthetic construct
  source 1..22: mol_type = other RNA
tgtgtatttccagtgcaattgt

SEQ ID NO: 10921 - RNA, 22 nt, synthetic construct
  source 1..22: mol_type = other RNA
tgtgtgtatgactaaagagaga

SEQ ID NO: 10922 - RNA, 22 nt, synthetic construct
  source 1..22: mol_type = other RNA
tgtgtgtgtatgactaaagaga

SEQ ID NO: 10923 - RNA, 22 nt, synthetic construct
  source 1..22: mol_type = other RNA
tgtgtgtgtgtatgactaaaga

SEQ ID NO: 10924 - RNA, 22 nt, synthetic construct
  source 1..22: mol_type = other RNA
tgtgttaggaatgaaatgagtc

SEQ ID NO: 10925 - RNA, 22 nt, synthetic construct
  source 1..22: mol_type = other RNA
tgttacaggcaccgagaatgtt

SEQ ID NO: 10926 - RNA, 22 nt, synthetic construct
  source 1..22: mol_type = other RNA
tgttaggaatgaaatgagtccc

SEQ ID NO: 10927 - RNA, 22 nt, synthetic construct
  source 1..22: mol_type = other RNA
tgttagtttcaccgatggctca

SEQ ID NO: 10928 - RNA, 22 nt, synthetic construct
  source 1..22: mol_type = other RNA
tgttcaatcttaccagtgctga

SEQ ID NO: 10929 - RNA, 22 nt, synthetic construct
  source 1..22: mol_type = other RNA
tgttctacactcatcttagtgc

SEQ ID NO: 10930 - RNA, 22 nt, synthetic construct
  source 1..22: mol_type = other RNA
tgttcttccgtcatattcctcc

SEQ ID NO: 10931 - RNA, 22 nt, synthetic construct
  source 1..22: mol_type = other RNA
tgttgaaagctccttttggatt

SEQ ID NO: 10932 - RNA, 22 nt, synthetic construct
  source 1..22: mol_type = other RNA
tgttgcaagattgaccccggaa

SEQ ID NO: 10933 - RNA, 22 nt, synthetic construct
  source 1..22: mol_type = other RNA
tgttgtattcagtgagggtctt

SEQ ID NO: 10934 - RNA, 22 nt, synthetic construct
  source 1..22: mol_type = other RNA
tgtttatgagccagacaaatgg

SEQ ID NO: 10935 - RNA, 22 nt, synthetic construct
  source 1..22: mol_type = other RNA
tgttttcatttcacaaaaatgc

SEQ ID NO: 10936 - RNA, 22 nt, synthetic construct
  source 1..22: mol_type = other RNA
tgttttggggactcatttcatt

SEQ ID NO: 10937 - RNA, 22 nt, synthetic construct
  source 1..22: mol_type = other RNA
ttaaaaatcattgattgtcagc

SEQ ID NO: 10938 - RNA, 22 nt, synthetic construct
  source 1..22: mol_type = other RNA
ttaaaaggtgtccttttcaatc

SEQ ID NO: 10939 - RNA, 22 nt, synthetic construct
  source 1..22: mol_type = other RNA
ttaaatcctcaggtcacaacca

SEQ ID NO: 10940 - RNA, 22 nt, synthetic construct
  source 1..22: mol_type = other RNA
ttaactcacctctcaaggtggg

SEQ ID NO: 10941 - RNA, 22 nt, synthetic construct
  source 1..22: mol_type = other RNA
ttaagcactattagagttgatt

SEQ ID NO: 10942 - RNA, 22 nt, synthetic construct
  source 1..22: mol_type = other RNA
ttaagggatggaaaaggaagac

SEQ ID NO: 10943 - RNA, 22 nt, synthetic construct
  source 1..22: mol_type = other RNA
ttacaggcaccgagaatgttgt

SEQ ID NO: 10944 - RNA, 22 nt, synthetic construct
  source 1..22: mol_type = other RNA
ttacatgcatttgaggtcaagt

SEQ ID NO: 10945 - RNA, 22 nt, synthetic construct
  source 1..22: mol_type = other RNA
ttaccagtgctgatcatttata

SEQ ID NO: 10946 - RNA, 22 nt, synthetic construct
  source 1..22: mol_type = other RNA
ttacttgacctcaaatgcatgt

SEQ ID NO: 10947 - RNA, 22 nt, synthetic construct
  source 1..22: mol_type = other RNA
ttagaagtgaagatgctgccag

SEQ ID NO: 10948 - RNA, 22 nt, synthetic construct
  source 1..22: mol_type = other RNA
ttagagcttatataagccgaaa

SEQ ID NO: 10949 - RNA, 22 nt, synthetic construct
  source 1..22: mol_type = other RNA
ttagagttcctcatgtagacct

SEQ ID NO: 10950 - RNA, 22 nt, synthetic construct
  source 1..22: mol_type = other RNA
ttagagttgattgtcaggaagc

SEQ ID NO: 10951 - RNA, 22 nt, synthetic construct
  source 1..22: mol_type = other RNA
ttagcttattatgcaagcctct

SEQ ID NO: 10952 - RNA, 22 nt, synthetic construct
  source 1..22: mol_type = other RNA
ttaggaaaatatgggttgcatt

SEQ ID NO: 10953 - RNA, 22 nt, synthetic construct
  source 1..22: mol_type = other RNA
ttaggaatgaaatgagtcccca

SEQ ID NO: 10954 - RNA, 22 nt, synthetic construct
  source 1..22: mol_type = other RNA
ttaggcagattgaaaaggacac

SEQ ID NO: 10955 - RNA, 22 nt, synthetic construct
  source 1..22: mol_type = other RNA
ttaggtgagttgaggagctaca

SEQ ID NO: 10956 - RNA, 22 nt, synthetic construct
  source 1..22: mol_type = other RNA
ttagtagctgacaatcaatgat

SEQ ID NO: 10957 - RNA, 22 nt, synthetic construct
  source 1..22: mol_type = other RNA
ttagtgcctgagagtatttagg

SEQ ID NO: 10958 - RNA, 22 nt, synthetic construct
  source 1..22: mol_type = other RNA
ttagtttcaccgatggctcagg

SEQ ID NO: 10959 - RNA, 22 nt, synthetic construct
  source 1..22: mol_type = other RNA
ttatacttcactccagaaagca

SEQ ID NO: 10960 - RNA, 22 nt, synthetic construct
  source 1..22: mol_type = other RNA
ttatataagccgaaaaacgtct

SEQ ID NO: 10961 - RNA, 22 nt, synthetic construct
  source 1..22: mol_type = other RNA
ttatataagctctaagagaagc

SEQ ID NO: 10962 - RNA, 22 nt, synthetic construct
  source 1..22: mol_type = other RNA
ttatatgtcaacgtatctgagc

SEQ ID NO: 10963 - RNA, 22 nt, synthetic construct
  source 1..22: mol_type = other RNA
ttatctgttagtttcaccgatg

SEQ ID NO: 10964 - RNA, 22 nt, synthetic construct
  source 1..22: mol_type = other RNA
ttatgagccagacaaatggagg

SEQ ID NO: 10965 - RNA, 22 nt, synthetic construct
  source 1..22: mol_type = other RNA
ttatgattctttgttacaggca

SEQ ID NO: 10966 - RNA, 22 nt, synthetic construct
  source 1..22: mol_type = other RNA
ttatgcaagcctctagtcttcc

SEQ ID NO: 10967 - RNA, 22 nt, synthetic construct
  source 1..22: mol_type = other RNA
ttatgtagatgtgcatttttgt

SEQ ID NO: 10968 - RNA, 22 nt, synthetic construct
  source 1..22: mol_type = other RNA
ttattatgcaagcctctagtct

SEQ ID NO: 10969 - RNA, 22 nt, synthetic construct
  source 1..22: mol_type = other RNA
ttatttcaggcaagtccaactc

SEQ ID NO: 10970 - RNA, 22 nt, synthetic construct
  source 1..22: mol_type = other RNA
ttcaaaatcttgaccaaatgca

SEQ ID NO: 10971 - RNA, 22 nt, synthetic construct
  source 1..22: mol_type = other RNA
ttcaaaatgtctgtagctcctc

SEQ ID NO: 10972 - RNA, 22 nt, synthetic construct
  source 1..22: mol_type = other RNA
ttcaatctgcctaaatactctc

SEQ ID NO: 10973 - RNA, 22 nt, synthetic construct
  source 1..22: mol_type = other RNA
ttcaatcttaccagtgctgatc

SEQ ID NO: 10974 - RNA, 22 nt, synthetic construct
  source 1..22: mol_type = other RNA
ttcacaaaaatgcacatctaca

SEQ ID NO: 10975 - RNA, 22 nt, synthetic construct
  source 1..22: mol_type = other RNA
ttcacaatatctacattctctc

SEQ ID NO: 10976 - RNA, 22 nt, synthetic construct
  source 1..22: mol_type = other RNA
ttcacatggcagcccagagttc

SEQ ID NO: 10977 - RNA, 22 nt, synthetic construct
  source 1..22: mol_type = other RNA
ttcaccgatggctcaggatatg

SEQ ID NO: 10978 - RNA, 22 nt, synthetic construct
  source 1..22: mol_type = other RNA
ttcactccagaaagcaggacaa

SEQ ID NO: 10979 - RNA, 22 nt, synthetic construct
  source 1..22: mol_type = other RNA
ttcacttctaaatgcatatcct

SEQ ID NO: 10980 - RNA, 22 nt, synthetic construct
  source 1..22: mol_type = other RNA
ttcagatacatggttgtgacct

SEQ ID NO: 10981 - RNA, 22 nt, synthetic construct
  source 1..22: mol_type = other RNA
ttcagcctctttagcttattat

SEQ ID NO: 10982 - RNA, 22 nt, synthetic construct
  source 1..22: mol_type = other RNA
ttcaggcaagtccaactcaagg

SEQ ID NO: 10983 - RNA, 22 nt, synthetic construct
  source 1..22: mol_type = other RNA
ttcagtgagggtcttcttacat

SEQ ID NO: 10984 - RNA, 22 nt, synthetic construct
  source 1..22: mol_type = other RNA
ttcatgcttctccctcttcaca

SEQ ID NO: 10985 - RNA, 22 nt, synthetic construct
  source 1..22: mol_type = other RNA
ttcatgtcttcttacttgacct

SEQ ID NO: 10986 - RNA, 22 nt, synthetic construct
  source 1..22: mol_type = other RNA
ttcattcctaacacagcatgtg

SEQ ID NO: 10987 - RNA, 22 nt, synthetic construct
  source 1..22: mol_type = other RNA
ttcattgatcacaaggccaccc

SEQ ID NO: 10988 - RNA, 22 nt, synthetic construct
  source 1..22: mol_type = other RNA
ttcatttcacaaaaatgcacat

SEQ ID NO: 10989 - RNA, 22 nt, synthetic construct
  source 1..22: mol_type = other RNA
ttccaaagtatacttccggggt

SEQ ID NO: 10990 - RNA, 22 nt, synthetic construct
  source 1..22: mol_type = other RNA
ttccagaggcatggaccttgag

SEQ ID NO: 10991 - RNA, 22 nt, synthetic construct
  source 1..22: mol_type = other RNA
ttccagtgcaattgtaggggtg

SEQ ID NO: 10992 - RNA, 22 nt, synthetic construct
  source 1..22: mol_type = other RNA
ttccataggtgtcttcccattc

SEQ ID NO: 10993 - RNA, 22 nt, synthetic construct
  source 1..22: mol_type = other RNA
ttccatcccttaaatcctcagg

SEQ ID NO: 10994 - RNA, 22 nt, synthetic construct
  source 1..22: mol_type = other RNA
ttccattatgattctttgttac

SEQ ID NO: 10995 - RNA, 22 nt, synthetic construct
  source 1..22: mol_type = other RNA
ttcccattccagaggcatggac

SEQ ID NO: 10996 - RNA, 22 nt, synthetic construct
  source 1..22: mol_type = other RNA
ttcccctccatcatcaccagat

SEQ ID NO: 10997 - RNA, 22 nt, synthetic construct
  source 1..22: mol_type = other RNA
ttccggggtcaatcttgcaaca

SEQ ID NO: 10998 - RNA, 22 nt, synthetic construct
  source 1..22: mol_type = other RNA
ttccgtcatattcctccatttg

SEQ ID NO: 10999 - RNA, 22 nt, synthetic construct
  source 1..22: mol_type = other RNA
ttcctaacacagcatgtgtatt

SEQ ID NO: 11000 - RNA, 22 nt, synthetic construct
  source 1..22: mol_type = other RNA
ttcctaatatgtacttcacaat

SEQ ID NO: 11001 - RNA, 22 nt, synthetic construct
  source 1..22: mol_type = other RNA
ttcctcaaaattgaccagagag

SEQ ID NO: 11002 - RNA, 22 nt, synthetic construct
  source 1..22: mol_type = other RNA
ttcctcatgtagaccttgtggc

SEQ ID NO: 11003 - RNA, 22 nt, synthetic construct
  source 1..22: mol_type = other RNA
ttcctccatttgtctggctcat

SEQ ID NO: 11004 - RNA, 22 nt, synthetic construct
  source 1..22: mol_type = other RNA
ttcctgacaatcaactctaata

SEQ ID NO: 11005 - RNA, 22 nt, synthetic construct
  source 1..22: mol_type = other RNA
ttccttgttgaaagctcctttt

SEQ ID NO: 11006 - RNA, 22 nt, synthetic construct
  source 1..22: mol_type = other RNA
ttccttttccatcccttaaatc

SEQ ID NO: 11007 - RNA, 22 nt, synthetic construct
  source 1..22: mol_type = other RNA
ttcggcttatataagctctaag

SEQ ID NO: 11008 - RNA, 22 nt, synthetic construct
  source 1..22: mol_type = other RNA
ttctaaatgcatatcctgagcc

SEQ ID NO: 11009 - RNA, 22 nt, synthetic construct
  source 1..22: mol_type = other RNA
ttctacactcatcttagtgcct

SEQ ID NO: 11010 - RNA, 22 nt, synthetic construct
  source 1..22: mol_type = other RNA
ttctatgttcttccgtcatatt

SEQ ID NO: 11011 - RNA, 22 nt, synthetic construct
  source 1..22: mol_type = other RNA
ttctccctcttcacatggcagc

SEQ ID NO: 11012 - RNA, 22 nt, synthetic construct
  source 1..22: mol_type = other RNA
ttctcggtgcctgtaacaaaga

SEQ ID NO: 11013 - RNA, 22 nt, synthetic construct
  source 1..22: mol_type = other RNA
ttctctctttagtcatacacac

SEQ ID NO: 11014 - RNA, 22 nt, synthetic construct
  source 1..22: mol_type = other RNA
ttctcttagagcttatataagc

SEQ ID NO: 11015 - RNA, 22 nt, synthetic construct
  source 1..22: mol_type = other RNA
ttctggagtgaagtataagaag

SEQ ID NO: 11016 - RNA, 22 nt, synthetic construct
  source 1..22: mol_type = other RNA
ttcttacatgcatttgaggtca

SEQ ID NO: 11017 - RNA, 22 nt, synthetic construct
  source 1..22: mol_type = other RNA
ttcttacttgacctcaaatgca

SEQ ID NO: 11018 - RNA, 22 nt, synthetic construct
  source 1..22: mol_type = other RNA
ttcttatacttcactccagaaa

SEQ ID NO: 11019 - RNA, 22 nt, synthetic construct
  source 1..22: mol_type = other RNA
ttcttccgtcatattcctccat

SEQ ID NO: 11020 - RNA, 22 nt, synthetic construct
  source 1..22: mol_type = other RNA
ttctttccattatgattctttg

SEQ ID NO: 11021 - RNA, 22 nt, synthetic construct
  source 1..22: mol_type = other RNA
ttctttgttacaggcaccgaga

SEQ ID NO: 11022 - RNA, 22 nt, synthetic construct
  source 1..22: mol_type = other RNA
ttgaaaaggacaccttttaact

SEQ ID NO: 11023 - RNA, 22 nt, synthetic construct
  source 1..22: mol_type = other RNA
ttgaaagctccttttggattta

SEQ ID NO: 11024 - RNA, 22 nt, synthetic construct
  source 1..22: mol_type = other RNA
ttgaacactgcccccaggtagc

SEQ ID NO: 11025 - RNA, 22 nt, synthetic construct
  source 1..22: mol_type = other RNA
ttgaaccctgtggtctcaaggt

SEQ ID NO: 11026 - RNA, 22 nt, synthetic construct
  source 1..22: mol_type = other RNA
ttgaatgcttcctgacaatcaa

SEQ ID NO: 11027 - RNA, 22 nt, synthetic construct
  source 1..22: mol_type = other RNA
ttgacatataaatgatcagcac

SEQ ID NO: 11028 - RNA, 22 nt, synthetic construct
  source 1..22: mol_type = other RNA
ttgaccaaatgcaacccatatt

SEQ ID NO: 11029 - RNA, 22 nt, synthetic construct
  source 1..22: mol_type = other RNA
ttgaccagagagagctcagata

SEQ ID NO: 11030 - RNA, 22 nt, synthetic construct
  source 1..22: mol_type = other RNA
ttgaccccggaagtatactttg

SEQ ID NO: 11031 - RNA, 22 nt, synthetic construct
  source 1..22: mol_type = other RNA
ttgacctcaaatgcatgtaaga

SEQ ID NO: 11032 - RNA, 22 nt, synthetic construct
  source 1..22: mol_type = other RNA
ttgagaccacagggttcaaaat

SEQ ID NO: 11033 - RNA, 22 nt, synthetic construct
  source 1..22: mol_type = other RNA
ttgagaggtgagttaaaaggtg

SEQ ID NO: 11034 - RNA, 22 nt, synthetic construct
  source 1..22: mol_type = other RNA
ttgaggaatctcagacgttttt

SEQ ID NO: 11035 - RNA, 22 nt, synthetic construct
  source 1..22: mol_type = other RNA
ttgaggagctacagacattttg

SEQ ID NO: 11036 - RNA, 22 nt, synthetic construct
  source 1..22: mol_type = other RNA
ttgaggtagcaaggcccacctt

SEQ ID NO: 11037 - RNA, 22 nt, synthetic construct
  source 1..22: mol_type = other RNA
ttgaggtcaagtaagaagacat

SEQ ID NO: 11038 - RNA, 22 nt, synthetic construct
  source 1..22: mol_type = other RNA
ttgagttggacttgcctgaaat

SEQ ID NO: 11039 - RNA, 22 nt, synthetic construct
  source 1..22: mol_type = other RNA
ttgatcacaaggccacccttct

SEQ ID NO: 11040 - RNA, 22 nt, synthetic construct
  source 1..22: mol_type = other RNA
ttgattgtcagctactaatgat

SEQ ID NO: 11041 - RNA, 22 nt, synthetic construct
  source 1..22: mol_type = other RNA
ttgattgtcaggaagcattcaa

SEQ ID NO: 11042 - RNA, 22 nt, synthetic construct
  source 1..22: mol_type = other RNA
ttgcaacaacctgcccctgagc

SEQ ID NO: 11043 - RNA, 22 nt, synthetic construct
  source 1..22: mol_type = other RNA
ttgcaagattgaccccggaagt

SEQ ID NO: 11044 - RNA, 22 nt, synthetic construct
  source 1..22: mol_type = other RNA
ttgcactggaaatacacatgct

SEQ ID NO: 11045 - RNA, 22 nt, synthetic construct
  source 1..22: mol_type = other RNA
ttgcataataagctaaagaggc

SEQ ID NO: 11046 - RNA, 22 nt, synthetic construct
  source 1..22: mol_type = other RNA
ttgcatttggtcaagattttga

SEQ ID NO: 11047 - RNA, 22 nt, synthetic construct
  source 1..22: mol_type = other RNA
ttgcctgaaataaatccaaaag

SEQ ID NO: 11048 - RNA, 22 nt, synthetic construct
  source 1..22: mol_type = other RNA
ttgctacctcaagggggactgt

SEQ ID NO: 11049 - RNA, 22 nt, synthetic construct
  source 1..22: mol_type = other RNA
ttgcttatctgttagtttcacc

SEQ ID NO: 11050 - RNA, 22 nt, synthetic construct
  source 1..22: mol_type = other RNA
ttggaatatacaaagtacagcc

SEQ ID NO: 11051 - RNA, 22 nt, synthetic construct
  source 1..22: mol_type = other RNA
ttggacttgcctgaaataaatc

SEQ ID NO: 11052 - RNA, 22 nt, synthetic construct
  source 1..22: mol_type = other RNA
ttggatttatttcaggcaagtc

SEQ ID NO: 11053 - RNA, 22 nt, synthetic construct
  source 1..22: mol_type = other RNA
ttggcctctttcagcctcttta

SEQ ID NO: 11054 - RNA, 22 nt, synthetic construct
  source 1..22: mol_type = other RNA
ttgggattctttccattatgat

SEQ ID NO: 11055 - RNA, 22 nt, synthetic construct
  source 1..22: mol_type = other RNA
ttggggactcatttcattccta

SEQ ID NO: 11056 - RNA, 22 nt, synthetic construct
  source 1..22: mol_type = other RNA
ttggtcaagattttgaatgctt

SEQ ID NO: 11057 - RNA, 22 nt, synthetic construct
  source 1..22: mol_type = other RNA
ttggttcatgtcttcttacttg

SEQ ID NO: 11058 - RNA, 22 nt, synthetic construct
  source 1..22: mol_type = other RNA
ttgtattcagtgagggtcttct

SEQ ID NO: 11059 - RNA, 22 nt, synthetic construct
  source 1..22: mol_type = other RNA
ttgtcagctactaatgatgttt

SEQ ID NO: 11060 - RNA, 22 nt, synthetic construct
  source 1..22: mol_type = other RNA
ttgtcaggaagcattcaaaatc

SEQ ID NO: 11061 - RNA, 22 nt, synthetic construct
  source 1..22: mol_type = other RNA
ttgtcctgctttctggagtgaa

SEQ ID NO: 11062 - RNA, 22 nt, synthetic construct
  source 1..22: mol_type = other RNA
ttgtctggctcataaacattag

SEQ ID NO: 11063 - RNA, 22 nt, synthetic construct
  source 1..22: mol_type = other RNA
ttgtgaagtacatattaggaaa

SEQ ID NO: 11064 - RNA, 22 nt, synthetic construct
  source 1..22: mol_type = other RNA
ttgtgacctgaggatttaaggg

SEQ ID NO: 11065 - RNA, 22 nt, synthetic construct
  source 1..22: mol_type = other RNA
ttgtgatcaatgaaactgggct

SEQ ID NO: 11066 - RNA, 22 nt, synthetic construct
  source 1..22: mol_type = other RNA
ttgtggctcaggggcaggttgt

SEQ ID NO: 11067 - RNA, 22 nt, synthetic construct
  source 1..22: mol_type = other RNA
ttgttacaggcaccgagaatgt

SEQ ID NO: 11068 - RNA, 22 nt, synthetic construct
  source 1..22: mol_type = other RNA
ttgttgaaagctccttttggat

SEQ ID NO: 11069 - RNA, 22 nt, synthetic construct
  source 1..22: mol_type = other RNA
ttgttgcaagattgaccccgga

SEQ ID NO: 11070 - RNA, 22 nt, synthetic construct
  source 1..22: mol_type = other RNA
tttaactcacctctcaaggtgg

SEQ ID NO: 11071 - RNA, 22 nt, synthetic construct
  source 1..22: mol_type = other RNA
tttaagcactattagagttgat

SEQ ID NO: 11072 - RNA, 22 nt, synthetic construct
  source 1..22: mol_type = other RNA
tttaagggatggaaaaggaaga

SEQ ID NO: 11073 - RNA, 22 nt, synthetic construct
  source 1..22: mol_type = other RNA
tttagaagtgaagatgctgcca

SEQ ID NO: 11074 - RNA, 22 nt, synthetic construct
  source 1..22: mol_type = other RNA
tttagcttattatgcaagcctc

SEQ ID NO: 11075 - RNA, 22 nt, synthetic construct
  source 1..22: mol_type = other RNA
tttaggcagattgaaaaggaca

SEQ ID NO: 11076 - RNA, 22 nt, synthetic construct
  source 1..22: mol_type = other RNA
tttatatgtcaacgtatctgag

SEQ ID NO: 11077 - RNA, 22 nt, synthetic construct
  source 1..22: mol_type = other RNA
tttatgagccagacaaatggag

SEQ ID NO: 11078 - RNA, 22 nt, synthetic construct
  source 1..22: mol_type = other RNA
tttatgtagatgtgcatttttg

SEQ ID NO: 11079 - RNA, 22 nt, synthetic construct
  source 1..22: mol_type = other RNA
tttatttcaggcaagtccaact

SEQ ID NO: 11080 - RNA, 22 nt, synthetic construct
  source 1..22: mol_type = other RNA
tttcaatctgcctaaatactct

SEQ ID NO: 11081 - RNA, 22 nt, synthetic construct
  source 1..22: mol_type = other RNA
tttcacaaaaatgcacatctac

SEQ ID NO: 11082 - RNA, 22 nt, synthetic construct
  source 1..22: mol_type = other RNA
tttcaccgatggctcaggatat

SEQ ID NO: 11083 - RNA, 22 nt, synthetic construct
  source 1..22: mol_type = other RNA
tttcagatacatggttgtgacc

SEQ ID NO: 11084 - RNA, 22 nt, synthetic construct
  source 1..22: mol_type = other RNA
tttcagcctctttagcttatta

SEQ ID NO: 11085 - RNA, 22 nt, synthetic construct
  source 1..22: mol_type = other RNA
tttcaggcaagtccaactcaag

SEQ ID NO: 11086 - RNA, 22 nt, synthetic construct
  source 1..22: mol_type = other RNA
tttcatgcttctccctcttcac

SEQ ID NO: 11087 - RNA, 22 nt, synthetic construct
  source 1..22: mol_type = other RNA
tttcattcctaacacagcatgt

SEQ ID NO: 11088 - RNA, 22 nt, synthetic construct
  source 1..22: mol_type = other RNA
tttcattgatcacaaggccacc

SEQ ID NO: 11089 - RNA, 22 nt, synthetic construct
  source 1..22: mol_type = other RNA
tttcatttcacaaaaatgcaca

SEQ ID NO: 11090 - RNA, 22 nt, synthetic construct
  source 1..22: mol_type = other RNA
tttccagtgcaattgtaggggt

SEQ ID NO: 11091 - RNA, 22 nt, synthetic construct
  source 1..22: mol_type = other RNA
tttccatcccttaaatcctcag

SEQ ID NO: 11092 - RNA, 22 nt, synthetic construct
  source 1..22: mol_type = other RNA
tttcctaatatgtacttcacaa

SEQ ID NO: 11093 - RNA, 22 nt, synthetic construct
  source 1..22: mol_type = other RNA
tttcggcttatataagctctaa

SEQ ID NO: 11094 - RNA, 22 nt, synthetic construct
  source 1..22: mol_type = other RNA
tttctggagtgaagtataagaa

SEQ ID NO: 11095 - RNA, 22 nt, synthetic construct
  source 1..22: mol_type = other RNA
tttgaaccctgtggtctcaagg

SEQ ID NO: 11096 - RNA, 22 nt, synthetic construct
  source 1..22: mol_type = other RNA
tttgaatgcttcctgacaatca

SEQ ID NO: 11097 - RNA, 22 nt, synthetic construct
  source 1..22: mol_type = other RNA
tttgaggaatctcagacgtttt

SEQ ID NO: 11098 - RNA, 22 nt, synthetic construct
  source 1..22: mol_type = other RNA
tttgaggtcaagtaagaagaca

SEQ ID NO: 11099 - RNA, 22 nt, synthetic construct
  source 1..22: mol_type = other RNA
tttggaatatacaaagtacagc

SEQ ID NO: 11100 - RNA, 22 nt, synthetic construct
  source 1..22: mol_type = other RNA
tttggatttatttcaggcaagt

SEQ ID NO: 11101 - RNA, 22 nt, synthetic construct
  source 1..22: mol_type = other RNA
tttgggattctttccattatga

SEQ ID NO: 11102 - RNA, 22 nt, synthetic construct
  source 1..22: mol_type = other RNA
tttggggactcatttcattcct

SEQ ID NO: 11103 - RNA, 22 nt, synthetic construct
  source 1..22: mol_type = other RNA
tttggtcaagattttgaatgct

SEQ ID NO: 11104 - RNA, 22 nt, synthetic construct
  source 1..22: mol_type = other RNA
tttgtctggctcataaacatta

SEQ ID NO: 11105 - RNA, 22 nt, synthetic construct
  source 1..22: mol_type = other RNA
tttgttacaggcaccgagaatg

SEQ ID NO: 11106 - RNA, 22 nt, synthetic construct
  source 1..22: mol_type = other RNA
ttttaactcacctctcaaggtg

SEQ ID NO: 11107 - RNA, 22 nt, synthetic construct
  source 1..22: mol_type = other RNA
ttttaagcactattagagttga

SEQ ID NO: 11108 - RNA, 22 nt, synthetic construct
  source 1..22: mol_type = other RNA
ttttcaatctgcctaaatactc

SEQ ID NO: 11109 - RNA, 22 nt, synthetic construct
  source 1..22: mol_type = other RNA
ttttcatgcttctccctcttca

SEQ ID NO: 11110 - RNA, 22 nt, synthetic construct
  source 1..22: mol_type = other RNA
ttttcatttcacaaaaatgcac

SEQ ID NO: 11111 - RNA, 22 nt, synthetic construct
  source 1..22: mol_type = other RNA
ttttccatcccttaaatcctca

SEQ ID NO: 11112 - RNA, 22 nt, synthetic construct
  source 1..22: mol_type = other RNA
ttttcctaatatgtacttcaca

SEQ ID NO: 11113 - RNA, 22 nt, synthetic construct
  source 1..22: mol_type = other RNA
ttttcggcttatataagctcta

SEQ ID NO: 11114 - RNA, 22 nt, synthetic construct
  source 1..22: mol_type = other RNA
ttttgaaccctgtggtctcaag

SEQ ID NO: 11115 - RNA, 22 nt, synthetic construct
  source 1..22: mol_type = other RNA
ttttgaatgcttcctgacaatc

SEQ ID NO: 11116 - RNA, 22 nt, synthetic construct
  source 1..22: mol_type = other RNA
ttttgaggaatctcagacgttt

SEQ ID NO: 11117 - RNA, 22 nt, synthetic construct
  source 1..22: mol_type = other RNA
ttttggatttatttcaggcaag

SEQ ID NO: 11118 - RNA, 22 nt, synthetic construct
  source 1..22: mol_type = other RNA
ttttggggactcatttcattcc

SEQ ID NO: 11119 - RNA, 22 nt, synthetic construct
  source 1..22: mol_type = other RNA
tttttaagcactattagagttg

SEQ ID NO: 11120 - RNA, 22 nt, synthetic construct
  source 1..22: mol_type = other RNA
tttttcatgcttctccctcttc

SEQ ID NO: 11121 - RNA, 22 nt, synthetic construct
  source 1..22: mol_type = other RNA
tttttcggcttatataagctct

SEQ ID NO: 11122 - RNA, 20 nt, synthetic construct
  source 1..20: mol_type = other RNA
aaaaaaatgtacttggttcc

SEQ ID NO: 11123 - RNA, 17 nt, synthetic construct
  source 1..17: mol_type = other RNA
aaaatgtacttggttcc

SEQ ID NO: 11124 - RNA, 17 nt, synthetic construct
  source 1..17: mol_type = other RNA
aaaaatgtacttggttc

SEQ ID NO: 11125 - RNA, 17 nt, synthetic construct
  source 1..17: mol_type = other RNA
aaaaaatgtacttggtt

SEQ ID NO: 11126 - RNA, 17 nt, synthetic construct
  source 1..17: mol_type = other RNA
aaaaaaatgtacttggt

SEQ ID NO: 11127 - protein, 1348 aa, synthetic construct
MSIKSDYFLGLDIGTDSIGWAVTDPEYHILRRKGKALWGIRLFDAANTAAERRTFRTSRRRIQRRRQRIRLLQELFAEEMVKLDPGFFQRLSDSAFWQEDKQEQQIYSLFTCENYTDVDYYREYPTIYHLRSALIQEKKEFDLRLLYLALHHLMKHRGHFLFNGSINNVTSFHTTFQTFADCLYDEFDIELECDSEDRFAEILKDKHARKTGKCSELEIICHIEKSNKQLKELFKLITGMKASLSVVFGDDELAEIEHNKISFSESSYDEVRLALEDEIQERTGILDIFHAVYSWAILADILEGGEYEGNSYLSVAKVSTYKKHGDDLRLLRTLVREYCPDHYKSFFSVSGKENYCAYAGTLKKNGKKQPIKRCSQEDFYKALKKLLNQMPTEQPEVKDIFIEIENGTFLPLQVSKDNGVIPYQVNKMELEKILQNAEEYLPFLKNIDEECGKTVSKKIIDLFEFRIPYYVGPLNTAKGENCWMVRKEAGRIYPWNFDEKVDRDQSAEKFIRRMTNQCTYLIHEDVVPKNSLLYSEFMVLNELNNVKIRSEKLPVELKQAIVLDLFKKQKQITGKKLLNYLNANGYDVKKEDLSGFDGNFKSSLSSYLTLKKVFGEELDKYSVQQMAEDIILWITLYGDDQKMLRRVIRKHYEQQLSEEQILSLSKLKFQGWGRLSRRLLSEMEGVDCETGECMTVMQGLRNTQNNLMQLLSQQFSFMELIEEENGNYYVDEITYDNLVKDMVISPSVKRAVWQTVQIVEEIKGVMGCQPKKIFVEMARSDEEKKRTVSRKDRLLEAYDAIKDEARQWQEELQKYSDGDFKAIKLYLYYTQMGQCMYTGRKIDLSQLNDATVWDRDHIYPQSKTKDDSLDNLVLVDRSVNAKKSDGMLSPEIQQRMRATWKYLKEKKLISEKKYERLTRVSPLTDEELAGFINRQLVETRQSSKAVATLLKRVYDEAEIVYVKAEAVSNFRRDNLDYIKVRDLNDYHHAKDAYQNIVVGNVFHEKFTSNPLRWLKNNPNTKYSLNQMFNFDLEKNGVVIWKRGKAGSIKCVEETLKRNDILFTRYAFCNKGGFFNQMLTAAPEDKTKAKGLVPIKKGMETWKYGGYTSVTPSHFMLVASKDKKGKEIRTIETVPLYRWKEFKENPDALLQYCREFYGLKEPKVLIPCIKKNARLVVNGFPMHLKGSTGKQLILQGAVQLCLNNENIKYLKKVTKYLEYNAQRRDKRTLLEVREVTGINKEENIQLYDVFVDKLSNTIYQYRPANPKDNLIKGREKFIELGLAEQCVVLGEVLHLFQCKPLTSDLTLIGGSPNTGTIKITKTISNCNVVKLLSQSIAGVKVREINLLII

SEQ ID NO: 11128 - DNA, 4047 bp, synthetic construct
  source 1..4047: mol_type = other DNA
atgagcataaaaagtgattattttttaggacttgatattggtacggattctattggatgggcggtaaccgacccagaatatcacatattgagacgaaaaggtaaagcattatggggaataagattatttgatgcggccaatacagcggcagaacggcgaacatttaggacaagccgaagaaggattcagagaagacgacagagaattcggttattgcaagaattatttgcagaagaaatggtaaaattagacccaggattttttcagaggttgtcagacagcgcattttggcaggaggataagcaagagcagcaaatttattcactttttacttgtgaaaattatacagatgttgattattacagagaatatcctactatttatcatttgagaagtgcattgattcaggaaaagaaggaatttgatcttcgtcttctatatcttgctcttcaccatttgatgaagcacaggggacatttcctgtttaatgggagtattaataatgtgacgtcatttcatacgacgtttcagacgtttgcagattgtctttatgatgagtttgatatagaactggaatgtgattccgaagatagatttgcagaaattttaaaggataaacatgccagaaaaacaggaaaatgttctgaattagagataatctgtcatatagaaaaatcaaataagcagctaaaagaactttttaaattaattacaggaatgaaagctagtttgagtgttgtgtttggtgatgatgagttagcggaaatagaacataataagattagtttttcagagagtagttatgatgaagtacgtcttgcattggaggatgagattcaggagaggactggtatactggatatctttcatgcagtttatagttgggcgattctcgcggatattttagaaggcggagaatatgaggggaattcttatctaagcgttgcgaaggtaagcacttataaaaagcatggtgatgatttgcggttgctaagaacactggttcgggaatattgtcctgatcattacaaatctttcttttccgtatcagggaaggagaattattgtgcatatgcgggtactttaaaaaagaatggaaaaaaacagccgattaaacgttgcagccaggaagatttttataaagcgttaaagaaattgctgaatcagatgccgacagaacaaccagaagtgaaagacatcttcatcgaaattgaaaatggtacttttttgccgttgcaggtaagtaaggataatggagtgataccttatcaggtaaataagatggaattagaaaaaatcctgcagaatgcagaggaatatttgccatttctaaaaaatatagatgaagaatgtggaaaaacggttagtaagaagattatagatctctttgagtttagaataccatattatgtagggccgcttaataccgctaaaggagaaaactgttggatggtcagaaaagaagcggggagaatatatccgtggaattttgatgaaaaggtagacagagatcaatcagcagaaaaatttatccgtagaatgacgaatcagtgtacatatttaatacatgaggatgttgtacctaaaaattctttgctttattcggagtttatggtgcttaatgaattaaataatgtaaagatccggtctgagaagctgccggtggagttaaaacaggcaatagtattggatttgtttaagaaacaaaagcagataacaggaaaaaaacttcttaattacttgaatgcaaatggatatgatgtaaaaaaagaagatttgtcagggtttgacggaaactttaaatcatctctgtcatcatatcttactttgaaaaaagtatttggtgaagaattagataaatatagtgtgcagcagatggcagaggatattatcttgtggatcactctgtatggagatgatcagaagatgttgcgcagggtaattcgaaaacattatgaacagcaattgagtgaagaacagattctttccttatcgaaattgaaattccaaggctggggaagattatccagacgacttttgagtgaaatggaaggcgttgattgtgagactggtgagtgtatgacggtcatgcaaggacttcgtaatactcagaataatctgatgcagcttctaagtcagcagttttcatttatggaattgattgaggaagaaaatgggaattattatgtagatgagattacatacgataatcttgtgaaagatatggttatatctccgtcagtgaagagagcagtctggcagacagttcagattgtggaggagattaagggggtaatgggctgtcagcctaagaagatatttgtcgagatggcgcgaagcgatgaagagaaaaagcgtactgtatctaggaaagacaggttattagaagcatatgatgcgatcaaggatgaggctcgtcaatggcaggaagagttgcaaaagtattcagatggtgattttaaggctattaaactttatctgtattatacgcagatggggcaatgtatgtatactggaagaaagatagatctgtcacaattaaatgatgcgacggtatgggacagagatcatatatatccacagtccaaaacaaaagatgatagtctggataatctggtattggtagaccggagcgtgaacgctaagaaaagtgatgggatgctatcacctgagattcagcagagaatgcgggctacttggaaatacttaaaagagaaaaagttgatttcagagaagaaatatgagcgtttgactagggtctcaccacttacagatgaggaattggcaggttttattaatcgacagttagttgaaacacgtcagtcttcgaaagcagtagcaacacttttgaaacgagtatatgatgaagcggagattgtctatgtaaaagcggaagctgtttcaaattttagaagagataatttggattatattaaggtgcgtgatctgaatgattatcatcatgctaaagatgcatatcagaatattgtagtggggaatgtttttcatgagaaatttaccagcaatccgcttcgttggctgaaaaacaatcctaatacgaaatatagtttaaatcagatgtttaactttgatttagagaaaaatggggtggtaatatggaaaagggggaaggctggaagtattaaatgtgttgaagaaacattgaaaagaaatgatattctttttacacgatatgctttttgtaataaaggtggtttttttaaccagatgttaacggcagctccagaagataaaacgaaagcaaagggacttgtaccaataaaaaaaggtatggaaacatggaaatacgggggatatacatcagtaactccgtcacattttatgttggttgcttcgaaagataagaaaggaaaggagataagaacgattgagacagttccgttgtataggtggaaagagttcaaagaaaatccagatgcattactccaatattgtagagagttctatggtttgaaagagcccaaggtgttgataccatgcatcaagaagaatgccagattagtcgttaatggatttccaatgcatttgaaagggagtacaggaaaacaattgattttgcagggagcggttcaattatgtctgaataatgaaaatataaagtatttgaaaaaagtcacaaaatatttggaatataatgcacagagaagagataaaagaacactgctggaagtaagagaggttacaggaattaacaaagaggaaaatatacagttatatgatgtgtttgttgataaattgagtaacacaatatatcagtatcgtccggccaatccaaaggacaatcttataaaaggaagagagaagtttatagaattagggttggcagaacaatgtgttgtgttaggtgaagtattgcatttgttccaatgtaaaccactcacgtctgatttgactttgattggaggttcaccgaatacagggacaataaaaataacaaagacaattagtaattgtaatgttgtaaagttgttaagccaatctattgcaggtgttaaagtgagagaaattaatttgttaataatatga

SEQ ID NO: 11129 - DNA, 4044 bp, synthetic construct
  source 1..4044: mol_type = other DNA
tctatcaagagcgactacttcctgggcctcgacatcggcacagattctatcggatgggccgtgacagaccccgagtaccacatcctgagaagaaagggcaaagccctgtggggcatcagactgttcgatgccgccaatactgccgccgagagaagaaccttccggaccagcagaagaagaatccagcggcggagacagcggatcagactgctgcaagagctgttcgccgaggaaatggttaagctggaccccggcttcttccagagactgagcgatagcgccttctggcaagaggacaagcaagagcagcagatctacagcctgtttacctgcgagaactacaccgacgtggactactacagagagtaccccaccatctaccacctgagaagcgccctgatccaagagaaaaaagagttcgacctgcggctgctgtatctggccctgcaccatctgatgaagcaccggggccactttctgttcaacggcagcatcaacaacgtgaccagcttccacaccaccttccagaccttcgccgactgcctgtacgacgagttcgacatcgagctggaatgcgacagcgaggacagattcgccgagatcctgaaggataagcacgccagaaagaccggcaagtgctctgagctggaaatcatctgccacatcgagaagtccaacaagcagctgaaagaactgttcaagctgatcaccggcatgaaggccagcctgagcgtggtgtttggagatgatgagctggccgagatcgagcacaacaagatcagcttcagcgagagcagctacgacgaagtgcggctggccctggaagatgagattcaagagagaaccggcatcctggacatcttccacgccgtgtattcttgggccatcctggccgatattctggaaggcggcgagtacgagggcaacagctatctgtctgtggccaaggtgtccacctacaagaagcacggcgacgacctgagactgctgagaacactcgtgcgcgagtactgccccgaccactacaagagctttttcagcgtgtccggcaaagagaactactgcgcctacgccggcacactgaagaagaacggcaagaagcagcccatcaagcggtgcagccaagaggacttctacaaggccctgaagaaactgctgaaccagatgcctaccgagcagcccgaagtgaaggatatcttcatcgagattgagaacggcaccttcctgcctctgcaagtgtccaaggacaacggcgtgatcccctaccaagtgaacaagatggaactcgagaagatcctgcagaacgccgaagagtacctgcctttcctgaagaacatcgacgaggaatgcggcaagaccgtgtccaagaagatcatcgacctgttcgagttcagaatcccctactacgtgggccctctgaataccgccaagggcgagaattgctggatggttcgaaaagaggccggcagaatctacccctggaacttcgatgagaaggtggacagagatcagagcgccgagaagttcatcagacggatgaccaaccagtgcacctacctgatccacgaggacgtggtgcctaagaacagcctgctgtactccgagttcatggtgctgaacgagctgaacaatgtgaagattcggagcgagaagctgcccgtggaactgaagcaggccatcgtgctggacctgtttaagaagcagaagcagatcacagggaagaagctgctcaactacctgaacgccaacggctacgacgtgaagaaagaggacctgagcggcttcgacggcaacttcaagtccagcctgtccagctacctgactctgaagaaggtgttcggagaggaactggacaagtacagcgtgcagcagatggccgaggacatcatcctgtggatcaccctgtatggcgacgatcagaaaatgctgcggagagtgatccggaagcactacgagcagcagctgtctgaggaacagatcctgagcctgagcaagctgaagttccaaggctggggcagactgtctagacggctgctctctgaaatggaaggcgtggactgtgaaaccggcgagtgcatgacagtgatgcagggcctgagaaacacccagaacaacctgatgcagctgctgagccagcagttcagcttcatggaactgatcgaggaagagaacgggaactactacgtcgacgagatcacctacgacaacctggtcaaggacatggtcatcagccctagcgtgaaaagggccgtgtggcagacagtgcagatcgtggaagaaatcaagggcgtgatgggatgccagcctaagaaaatcttcgtggaaatggcccgcagcgacgaagagaagaaacggaccgtgtctcggaaggatcggctgctggaagcctacgacgccatcaaggatgaggcccggcaatggcaagaagaactgcagaaatactccgacggcgatttcaaggccatcaagctgtacctgtactacacccagatgggccagtgcatgtacaccggcagaaaaatcgatctgtcccagctgaacgacgccaccgtgtgggatagagatcacatctaccctcagagcaagaccaaggacgacagcctggacaatctggtgctggtggatagatccgtgaatgccaagaaaagcgacggcatgctgagccccgagatccagcagagaatgagagccacctggaagtacctgaaagaaaagaagctcatcagcgagaagaagtacgagcggctgaccagagtgtcccctctgacagatgaagaactggccggcttcatcaaccggcagctggtggaaacaagacagagcagcaaagccgtggccacactgctgaagagggtgtacgatgaggccgagattgtgtatgtgaaggccgaggccgtgtctaacttccggcgggataacctggactacatcaaagtgcgggacctgaacgactaccaccacgccaaggacgcctaccagaacatcgtcgtgggcaacgtgttccacgagaagtttaccagcaatcccctgcggtggctgaaaaacaaccccaacaccaagtactccctcaaccagatgttcaacttcgacctggaaaagaacggcgtggtcatctggaagagaggcaaggccggctccattaagtgtgtggaagagacactgaagcggaacgacatcctgttcaccagatacgctttctgcaacaaaggcggcttctttaatcagatgctgaccgccgctccagaggataagacaaaggccaaaggcctggtgcctatcaagaaaggcatggaaacctggaaatacggcggctacaccagcgtgacccctagccactttatgctggtggccagcaaggacaagaagggaaaagagatccggaccatcgagacagtgcccctgtaccggtggaaagagttcaaagagaatcccgacgctctgctccagtactgcagagagttctacggcctgaaagagcccaaggttctgatcccttgcatcaagaagaatgcccggctggtcgtgaacggcttccctatgcacctgaagggcagcaccggaaaacagctgattctgcagggtgccgtgcagctgtgcctgaacaacgagaacatcaagtacctcaagaaagtgacgaagtacctcgagtacaacgcccagcggagagacaagagaaccctgctcgaagttcgggaagtgaccggaatcaacaaagaggaaaacatccagctgtacgatgtgttcgtggacaagctgagcaacacaatctaccagtacagacccgccaatcctaaggacaacctcatcaagggccgcgagaaattcatcgagcttggcctggctgagcagtgcgtggtgctgggagaagtgctgcatctgttccagtgcaagcccctgaccagcgatctgacactgatcggcggaagccctaacaccggcaccatcaagatcaccaagaccatcagcaactgcaacgtggtcaagctgctgtcccagtctatcgccggcgtgaaagtccgcgagatcaacctgctgatcatctga

SEQ ID NO: 11130 - RNA, 107 nt, synthetic construct
  source 1..107: mol_type = other RNA
gtttgagagtagtgtaagaaattacactacaagttcaaataaaaatttattcaaatccatttgctacattgtgtagaatttaaagatctggcaacagatcttttttt